(19) United States
(12) Patent Application Publication
(10) Pub. No.: US 2007/0191272 A1
(43) Pub. Date: Aug. 16, 2007

(54) Proteinaceous pharmaceuticals and uses thereof

(76) Inventors: Willem P.C. Stemmer, Los Gatos, CA (US); Volker Schellenberger, Palo Alto, CA (US); Martin Bader, Mountain View, CA (US); Michael Scholle, Mountain View, CA (US)

Correspondence Address: WILSON SONSINI GOODRICH & ROSATI, 650 PAGE MILL ROAD, PALO ALTO, CA, 94304-1050, US

(21) Appl. No.: 11/528,927

(22) Filed: Sep. 27, 2006

Related U.S. Application Data
(60) Provisional application No. 60/721,270, filed on Sep. 27, 2005.
(60) Provisional application No. 60/721,188, filed on Sep. 27, 2005.
(60) Provisional application No. 60/743,622, filed on Mar. 21, 2006.

(51) Int. Cl. A61K 38/16; C40B 40/08; C40B 40/10; C07K 14/47

(52) U.S. Cl. 514/12; 435/7.1; 435/6; 530/324

(57) ABSTRACT

The present invention provides cysteine-containing scaffolds and/or proteins, expression vectors, host cell and display systems harboring and/or expressing such cysteine-containing products. The present invention also provides methods of designing libraries of such products, methods of screening such libraries to yield entities exhibiting binding specificities towards a target molecule. Further provided by the invention are pharmaceutical compositions comprising the cysteine-containing products of the present invention.

### CROSS-REFERENCE

[0001] This application claims priority to U.S. Provisional Application Nos. 60/721,270 and 60/721,188, both filed on Sep. 27, 2005, and U.S. Provisional Application No. 60/743,622 filed on Mar. 21, 2006, all which are incorporated herein by reference in their entirety.

### BACKGROUND OF THE INVENTION

[0002] One of the fundamental concepts of molecular biology is that each natural protein adopts a single ‘native’ structure or fold. Adoption of any fold other than the native fold is regarded as ‘misfolding’. Few or no examples exist of natural proteins adopting multiple native, functional folds. Misfolding is a serious problem, exemplified by the infectious nature of prions, whose ‘wrong’ fold causes other prion proteins to misfold in a catalytic manner and leads to brain disease and certain death. Almost any protein, when denatured, can misfold to form fibrillar polymers, which appear to be involved in a number of degenerative diseases. An example are the beta-amyloid fibrils involved in Alzheimer's disease. Misfolding of proteins generally results in the irreversible formation of insoluble aggregates, but denatured proteins can also occur as molten globules. From a molten globule state, which explores a huge diversity of unstable structures, the protein is thought to follow a funnel-shaped pathway, gradually reducing the diversity of folding intermediates until a single, stably folded native structure is achieved. The native protein can be altered structurally by allosteric regulation, lid/flap-type movements of one domain relative to other domains, induced fit upon binding to a ligand, or by crystallization forces, but these alterations generally involve movement in hinge-like structures rather than fundamental change in the basic fold. All of the available examples support the notion that natural proteins have evolved to adopt a single stable fold to effect their biological function, and that deviation from this native structure is deleterious.

[0003] There have been a few examples of the same protein sequence (excluding variants created by alternative splicing, glycosylation or proteolytic processing) existing naturally in more than one form, but the second form is usually simply an inactive by-product which has lost a disulfide bond (Schulz et al., 2005; Petersen et al., 2003; Lauber et al., 2003). In the microprotein family, which include small proteins with high disulfide density (mostly toxins and receptor-domains), examples have been found of closely related sequences adopting a different structure due to fully formed (not simply defective) but alternative disulfide bonding pattern. Examples are Somatomedin (Kamikubo et al., 2004) and Maurotoxin (Fajloun et al., 2000).

[0004] Protein display libraries have traditionally used a single fixed protein fold, like immunoglobulin domains of various species, Interferons, Protein A, Ankyrins, A-domains, T-cell receptors, Fibronectin III, gamma-Crystallin, Ubiquitin and many others, as reviewed in Binz, A. et al. (2005) Nature Biotechnology 23:1257. In some cases, like immunoglobulin libraries derived from the human immune repertoire, a single library uses many different V-region sequences as scaffolds, but they all share the basic immunoglobulin fold. A different type of library is the random peptide or cyclic peptide library, but these are not considered proteins since they do not have any defined fold and do not adopt a single stable structure.

[0005] There remains a considerable need for the design of novel protein structures that are amenable to rational selection via, e.g., directed evolution to create therapeutics that exhibit one or more desirable properties. Such desired properties include but are not limited to reduced immunogenicity, enhanced stability or half life, multispecificity, multivalency, and high target binding affinity.

### SUMMARY OF THE INVENTION

[0006] One aspect of the present invention is the design of novel protein structures exhibiting high disulfide density. The protein structures are particularly amenable to rational design and selection via, e.g., directed evolution to create therapeutics that exhibit one or more desirable properties. Such desired properties include but are not limited to high target binding affinity and/or avidity, reduced molecular weight and improved tissue penetration, enhanced thermal and protease stability, enhanced shelflife, enhanced hydrophilicity, enhanced formulation (esp. high concentration), and reduced immunogenicity.

[0007] In one embodiment, the present invention provides various protein structures in form of, e.g. scaffolds, and libraries of such protein structures. In one aspect, the scaffolds exhibit a diversity of folds or other non-primary structures. In another aspect, the scaffolds have defined topologies to effect the biological functions. In another embodiment, the present invention provides methods of constructing libraries of such protein structures, methods of displaying such libraries on genetic vehicles or packages (e.g., viral packages such as phages or the like, and non-viral packages (such as yeast display, E. coli surface display, ribosome display, or CIS (DNA-linked) display), as well as methods of screening such libraries to yield therapeutics or candidate therapeutics. The present invention further provides vectors, host cells and other in vitro systems expressing or utilizing the subject protein structures.

[0008] In another embodiment, the present invention provides a non-naturally occurring cysteine (C)-containing scaffold exhibiting a binding specificity towards a target molecule, wherein the non-naturally occurring cysteine (C)-containing scaffold comprise intra-scaffold cysteines according to a pattern selected from the group of permutations represented by the formula

$${\prod }_{i = 1}^{n} 2 i - 1 ,$$

wherein n equals to the predicted number of disulfide bonds formed by the cysteine residues, and wherein Π represents the product of (2i−1), where i is a positive integer ranging from 1 up to n.

[0009] In another embodiment, the present invention provides a non-naturally occurring cysteine (C)-containing protein comprising a polypeptide having no more than 35 amino acids, in which at least 10% of the amino acids in the polypeptide are cysteines, at least two disulfide bonds are formed by pairing intra-scaffold cysteines, and wherein said pairing yields a complexity index greater than 3.

[0010] In one aspect, the non-naturally occurring cysteine (C)-containing protein may comprise a polypeptide having no more than about 60 amino acids, in which at least 10% of the amino acids in the polypeptide are cysteines, at least four disulfide bonds are formed by pairing cysteines contained in the polypeptide, and wherein said pairing yields a complexity index greater than 4, 6, or 10.

[0011] In another aspect, the non-naturally occurring cysteine (C)-containing protein of the present invention exhibits the target binding capability after being heated to a temperature higher than about 50° C., preferably higher than about 80° C. or even higher than 100° C. for a given period of time, which may range from 0.001 second to 10 minutes.

[0012] In some aspects, the non-naturally occurring cysteine (C)-containing protein described herein is conjugated to a moiety selected from the group consisting of labels (i.e., GFP, HA-tag, Flag, Cy3, Cy5, FITC), effectors (ie enzymes, cytotoxic drugs, chelates), antibodies (ie whole antibodies, Fc region, dAbs, scFvs, diabodies), targeting modules (peptides or domains, such as the VEGF heparin binding exons) that concentrate the molecule in a desired tissue or compartment such as a tumor, barrier-transport conjugates that enhance transport across tissue barriers (transdermal, oral, intestinal, buccal, vaginal, rectal, nasal, pulmonary, blood-brain-barrier, transscleral) such as arginine rich peptides, alkyl saccharides, (ionic or non-ionic) amphipathic or amphiphilic peptides that mimic detergents and form micelles containing or displaying the protein, and half-life extending moieties including small molecules (for example those that bind to albumin or insert into the cell membrane), chemical polymers such as polethyleneglycol (PEG) or a variety of peptide and protein sequences (including hydrophobic peptides that may insert into the membrane or bind nonspecifically), (human) serum albumin, transferrin, polymeric glycine-rich sequences such as poly(GGGS) linkers. The linkages forming these conjugates may be formed genetically or chemically. The cysteine-containing proteins can also be homo- or hetero-multimerized to form 2-mers, 3-mers, 4-mers, 5-mers, 6-mers, 7-mers, 8-mers, 9-mers, 10-mers, 11-mers, 12-mers, 14-mers, 16-mers, 18-mers, 20-mers or even higher order multimers, which will extend the halflife of the protein, increase the concentration of binding sites and thus improve the apparent association constant and, depending on the target, may increase the binding avidity as well. The higher order multimers can be created via fusion into a single large gene, or by adding genetically encoded peptide-binding-peptides (‘association peptides’) onto the protein such that separately expressed proteins bind to each other via the association peptides at the N- and/or C-terminus, forming protein multimers, or via a variety of chemical linkages. Suitable half-life extending moieties include but are not limited to moieties that bind to serum albumin, IgG, erythrocytes, and proteins accessible to the serum. Each target and each therapeutic use favors a different combination of multiple of these elements.

[0013] The present invention also provides a non-natural protein containing a single domain of 20-60 amino acids which has 3 or more disulfides and binds to a human serum-exposed protein and has less than 5% aliphatic amino acids.

[0014] The present invention further provides a non-naturally occurring protein containing a single domain of 20-60 amino acids which has 3 or more disulfides and binds to a human serum-exposed protein and has a score in the T-Epitope program that is lower than 90% of the average for proteins in the database, preferably lower than 99% of the average for proteins in the database, and more preferably lower than 99% of average human proteins in the database. Also included in the present invention are libraries of the subject non-naturally occurring proteins, expression vectors including genetic packages encoding the proteins, as well as other host cells expressing or displaying the proteins.

[0015] Further included in the present invention are methods of producing the cysteine-containing microproteins disclosed herein.

[0016] Also encompassed in the present invention is a method of detecting the presence of a specific interaction between a target and an exogenous polypeptide that is displayed on a genetic package. The method involves the steps of (a) providing a genetic package displaying of the present invention; (b) contacting the genetic package with the target under conditions suitable to produce a stable polypeptide-target complex; and (c) detecting the formation of the stable polypeptide-target complex on the genetic package, thereby detecting the presence of a specific interaction. The method may further comprise the step of isolating the genetic package that displays a polypeptide having the desired property, or sequencing the portion of the sequence carried by the genetic package that encodes the desired polypeptide. Exemplary genetic packages include but are not limited viruses (e.g. phages), cells and spores.

### BRIEF DESCRIPTION OF THE DRAWINGS

[0017] FIGS. 1-12, 14-16, 20-35, 37-73, 75-83, 85-93, 95-97, 99, 101-102, 104-107, 111, 113-115, 123 depict various scaffolds and motifs contained therein.

[0018] Motif for FIG. 1:

1) CxPhxxxCxxxxdCCxxxCxrrGxxxxxrC

2) CxPxxxxCxxxxxCCxxxCxxxxGxxxxxC

3) CxxxxxxCxxxxxCCxxxCxxxxxxxxxxC

CDP: C6C5C0C3C10C

[0019] Motif for FIG. 2:

1) fCCPxxryCCw

2) CCPxxxxCCW

3) CCxxxxxCC

CDP: C0C5C0C

[0020] Motif for FIG. 3:

1) CxxxfWxCxxxxxCCgwxxCxxgxC

2) CxxxxWxCxxxxxCCxWxxCxxxxC

3) CxxxxxxCxxxxxCCxxxxCxxxxC

CDP: C6C5C0C4C4

[0021] Motif for FIG. 4:

1) CxgydxxCxxxxpCCxxxxxxxCxxxxgyWWyxxxyC

2) CxxxxxxCxxxxxCCxxxxxxxCxxxxxxWWxxxxxC

3) CxxxxxxCxxxxxCCxxxxxxxCxxxxxxxxxxxxxC

CDP: C6C5C0C7C13C

[0022] Motif for FIG. 5:

1) CxfxCxxxxxgxxpCxxxxxxxxxxxxxxxxxCxggWxCxxxxC

2) CxxxCxxxxxxxxxCxxxxxxxxxxxxxxxxxCxxxWxCxxxxC

3) CxxxCxxxxxxxxxCxxxxxxxxxxxxxxxxxCxxxxxCxxxxC

CDP: C3C9C17C5C4C

[0023] Motif for FIG. 6:

1) CxxxxxxCxxHxxCCxxxCxxgxCxxxxxwxxxgC

2) CxxxxxxCxxHxxCCxxxCxxxxCxxxxxxxxxxC

3) CxxxxxxCxxxxxCCxxxCxxxxCxxxxxxxxxxC

CDP: C6C5C0C3C4C10C

[0024] Motif for FIG. 7:

1) CxxxgxxCxxdgxCCxgxCxxxfxgxxC

2) CxxxxxxCxxxxxCCxxxCxxxxxxxxC

CDP: C6C5C0C3C8C

[0025] Motif for FIG. 8:

1) CxdxxCxxyCxgxxyxxgxCdgpxxCxC

2) CxxxxCxxxCxxxxxxxxxCxxxxxCxC

CDP: C4C3C9C5C1C

[0026] Motif for FIG. 9:

1) ChfxxCxxdCrrxxPGxyGxCxxxxxGxxCxC

2) CxxxxCxxxCxxxxPGxxGxCxxxxxGxxCxC

3) CxxxxCxxxCxxxxxxxxxxCxxxxxxxxCxC

CDP: C4C3C10C8C1C

[0027] Motif for FIG. 10:

1) CixxgxxCxG(xx)xxxxCxCCxxxxyCxCxxx(xxx)FG(x)xxxxCxC(x)xxxxxCxxxxxx(x)xxxxxC

2) CxxxxxxCxG(xx)xxxxCxCCxxxxxCxCxxx(xxx)FG(x)xxxxCxC(x)xxxxxCxxxxxx(x)xxxxxC

3) CxxxxxxCxx(xx)xxxxCxCCxxxxxCxCxxx(xxx)xx(x)xxxxCxC(x)xxxxxCxxxxxx(x)xxxxxC

[0028] Motif for FIG. 11:

1) CxPCfttxxxxxxxCxxCCxxx(x)xgxCxxxqCxC

2) CxPCxxxxxxxxxxCxxCCxxx(x)xxxCxxxxCxC

3) CxxCxxxxxxxxxxCxxCCxxx(x)xxxCxxxxCxC

CDP: C2C10C2C0C6(7)C4C1C

[0029] Motif for FIG. 12:

CxxxxxxCxxxxxxCCxxxCxxxxC

CDP: C6C6C0C3C4C

[0030] Motifs for FIG. 14:

1) Cxx(x)xCxxxxxxxxxxCxCxxxCxxxxxCCxxxxxxC

2) Cxx(x)RCxExxxxxxxxCxCxxxCxxxxxCCxD[yf]xxxC

CDP: C3-4C10C1C3C5C6C

[0031] Motifs for FIG. 15:

1) Cxxxxx(x)x(x)xxxxxCpxgxxxC[yf]xkxxxx(xx)CxxrxxxxxrGCxxtCPxkxx(x)xxxxxCCxtdxCN

2) Cxxxxx(x)x(x)xxxxxCxxxxxxCxxxxxxx(xx)CxxxxxxxxxGCxxxCPxxxx(x)xxxxxCCxxxxCN

3) Cxxxxx(x)x(x)xxxxxCxxxxxxCxxxxxxx(xx)CxxxxxxxxxxCxxxCxxxxx(x)xxxxxCCxxxxC

CDP: C6-8C6C7-9C10C3C10-11C0C4C

[0032] Motifs for FIG. 16:

1) CxxCxxxxxxxxC(xxx)xxxxxxCxxxxxxCxxxxxxxxxxxxxxxxxxxxCxx(xx)xC(p)xx(x)xxxxxxxxxxx(x)xxxxxCCxxxxC

[0033] Motifs for FIG. 20:

1) CgxqxxxxxCxxxxCCsxxGxCGxxxxyCxx(x)xCx(x)xxC

2) CxxxxxxxxCxxxxCCxxxxxCxxxxxxCxx(x)xCx(x)xxC

CDP: C8C4C0C5C6C3-4C3-4C

[0034] Motifs for FIG. 21:

1) Cxxx(x)xxxxxxx(xx)xxxC(x)xxxxxCxxxxxx(x)xxxCxxxxxxxxxxxxCxxxxx(xx)xxC

2) Cxxx(x)xxxxxxx(xx)xxxC(x)xx[yf]xxCxxxxxx(x)xxxCxxxxx[yf]xxxxxxCxxxxx(xx)xxC

CDP: C13-16C5-6C9-10C12C7-9C

[0035] Motifs for FIG. 22:

1) C(xx)xY(gg)xxxxxxCxxxCxx(x)xxxCxxxCxx(x)xgaxxgxCxxxx(x)xxxxxC[wylf]C

2) C(xx)xx(xx)xxxxxxCxxxCxx(x)xxxCxxxCxx(x)xxxxxxxCxxxx(x)xxxxxCxC

CDP: C8-12C3C5-6C3C9-10C9-10C1C

[0036] Motifs for FIG. 23:

1) CxxxxxxxxCxxxCxxxCxxxxx(xxxx)xxxCxxxx(xxxx)xxCxxxxCxCxxxxxxxxxx(x)xCxxxxxC

2) CpxxxxxxxCxxxCxxxCxxxxx(xxxx)xxxCxxxx(xxxx)xxCxxxxCxCxxgxxxxxxx(x)xCvxxxxC

CDP: C8C3C3C8-12C6-10C4C1C

[0037] Motifs for FIG. 24:

1) CxxxCxxxxxxxxCPxxxxx(x)xxxxxCxxCCxxxxxCxxxxxxxxxxC

2) CtxxCdxxxxxxxCPxxxxx(xx)xxxxxCxxCCxxgxGCx[yfl][yfl]xxxxGxx[ivl]C

CDP: C3C8C11-12C2C0C5C10C

[0038] Motifs for FIG. 25:

1) CxxxxSxx[Fwy]xGxCxxxxxCxxxCxxexxx(xx)xGxCxx(xx)xxr[rk]CxCxxxC

2) CxxxxSxxFxGxCxxxxxCxxxCxxxxxx(xx)xGxCxx(xx)xxxxCxCxxxC

3) CxxxxxxxxxxxCxxxxxCxxxCxxxxxx(xx)xxxCxx(xx)xxxxCxCxxxC

CDP: C11C5C3C9-11C6-8C1C3C

[0039] Motifs for FIG. 26:

C(xxx)xxxxxxCCxxx(x)xCxx(xx)xxxC

CDP: C6-9C0C4-5C5-7C

[0040] Motifs for FIG. 27:

1) CxxxCxshxxCxxxCxCxxxx[xc]x[xc]

[0041] Motifs for FIG. 28:

1) CxgrxxrCppxCCxgxxCxrgxxxxC

2) CxxxxxxCxxxCCxxxxCxxxxxxxC

CDP: C6C3C0C4C7C

[0042] Motifs for FIG. 29:

1) CCxxpxxCxxrxCxpxxCC

2) CCxxxxxCxxxxCxxxxCC

CDP: C0C5C4C4C0C

[0043] Motifs for FIG. 30:

1) CCgxypxxxChpCxCxxxrpxyC

2) CCxxxxxxxCxxCxCxxxxxxxC

CDP: C0C7C2C1C7C

[0044] Motifs for FIG. 31:

1) CxxtGxxCxxxxx[cx]Csx(x)Ga[cx]sxxFxxC

2) CxxxxxxCxxxxx[cx]Cxx(x)xx[cx]xxxxxxC

[0045] Motifs for FIG. 32:

1) CxxxxC(x)xxxCxxGxxxDxxgCxx(xx)xCxC

2) CxxxxC(x)xxxCxxxxxxxxxxCxx(xx)xCxC

CDP: C4C3-4C10C2-4C1C

[0046] Motifs for FIG. 33:

1) CxxxxxxCCDPCaxCxCRFFxxxCxCR

2) CxxxxxxCCxxCxxCxCxxxxxxCxC

CDP: C6C0C2C2C1C6C1C

[0047] Motifs for FIG. 34:

1) CxpgxxxkxxCNxCxCxxxx(x)xxxTxxxC

2) CxxxxxxxxxCNxCxCxxxx(x)xxxTxxxC

3) CxxxxxxxxxCxxCxCxxxx(x)xxxxxxxC

CDP: C9C2C1C11-12C

[0048] Motifs for FIG. 35:

1) Cxx(xx)xxxxxCxxxxxxx(x)CxxxxxxxxxxxxCxxxCxxC

2) Cxx(xx)DxxxxCxxxxxxx(x)CxxxxxxxxxxxxCxxxCxxC

3) Cxx(xx)DxxxxCxx[wylfim]xxxx(x)CxxxxxxxxxxxxCxxtCxxC

CDP: C7-9C7-8C12C3C2C

[0049] Motifs for FIG. 37:

1) C(xxxx)CxxxxxCxxx(xxxxxxx)xxxCxCxxxx(xx)xxxxxC

2) C(xxxx)CxxxGxCxxx(xxxxxxx)xxxCxCxxxx(xx)xxGxxC

3) C(xxxx)CxxxGxCxxx(xxxxxxx)xxxCxCxxxx(xx) [ywflh]xGxxC

CDP: C0-4C5C6-13C1C9-11C

[0050] Motifs for FIG. 38:

1) Cxxxx(x)xCxxxxxCxxxxx(xx)xxxCxCxxx(xxx)xxxxxxC

2) Cxxxx(x)xCxxxgxCxxxxx(xx)xxxCxCxxg(xxx)xxxgxxC

CDP: C5-6C5C8-10C1C9-12C

[0051] Motifs for FIG. 39:

1) CxCxxxxxxx(xx)xxCxxx(xxxxxxxx)xxxxxxCxCxxxxxxxxCxxCxxxxxxxxx(xx)xxxxxC

2) CxCxxxxxxx(xx)xxCxxx(xxxxxxxx)xxxxGxCxCxxxxxGxxCxxCxxxxxxxxx(xx)xxxxxC

CDP: C1C9-11C9-17C1C8C2C14-16C

[0052] Motifs for FIG. 40:

1) DxdECxxxxxxCx(xx)xxxxxCxNxxGx[fy]xCx(xxx)xCxxg[yf]x(xxxx)xxxxxxxC

2) DxxECxxxxxxCx(xx)xxxxxCxNxxGxxxCx(xxx)xCxxxxx(xxxx)xxxxxxxC

3) CxxxxxxCx(xx)xxxxxCxxxxxxxxCx(xxx)xCxxxxx(xxxx)xxxxxxxC

CDP: C6C6-8C8C2-5C12-16C

[0053] Motifs for FIG. 41:

1) CsxHGxxxxDGxx(x)xxGxxPxCeCxxCyxGxxCsxxxxxC

2) CxxHGxxxxDGxx(x)xxGxxPxCxCxxCxxGxxCxxxxxxC

3) Cxxxxxxxxxxxx(x)xxxxxxxCxCxxCxxxxxCxxxxxxC

CDP: C19-20C1C2C5C6C

[0054] Motifs for FIG. 42:

1) CxxxxGxCRxkxxxnCxxxxxxxCxnxxqkCC

2) CxxxxGxCRxxxxxxCxxxxxxxCxxxxxxCC

3) CxxxxxxCxxxxxxxCxxxxxxxCxxxxxxCC

CDP: C6C7C7C6C0C

[0055] Motifs for FIG. 43:

1) CxxxxxxCxxxxCxxxxxxxxxCxxxxxxCC

2) CxxxxgxCxxxxCxxxxxxxgxCxxxxxxCC

CDP: C6C4C9C6C0C

[0056] Motifs for FIG. 44:

1) CxxHCxxxgxxggxCxx(xxx)xxxCxC

2) CxxHCxxxxxxxxxCxx(xxx)xxxCxC

3) CxxxCxxxxxxxxCxx(xxx)xxxCxC

CDP: C3C8C5-8C1C

[0057] Motifs for FIG. 45:

1) CxCRxxxCxxxExxxGxCxxxxxx[yfh]x[yfl]CC

2) CxCRxxxCxxxExxxGxCxxxxxxxxxCC

3) CxCxxxCxxxxxxxxxCxxxxxxxxxCC

CDP: C1C3C9C9C0C

[0058] Motifs for FIG. 46:

1) CCxxxxxRxx[yf]nxCrxxGxxxxxCaxxxxCxiisgxxC

2) CCxxxxxRxxxxxCxxxGxxxxxCxxxxxCxxxxxxxC

3) CCxxxxxxxxxxxCxxxxxxxxxCxxxxxCxxxxxxxC

CDP: C0C11C9C5C7C

[0059] Motifs for FIG. 47:

1) CxxaxxxCxxxxCxxxCxx(x)xxxxxCxxx[vi]xx(x)xxC

2) CxxxxxxCxxxxCxxxCxx(x)xxxxxCxxxxxxx(x)xxC

[0060] Motifs for FIG. 48:

1) Cxxxxxxx(x)xxxxxCCCxxxx(x)xxxxxxCxxC

2) Cxxxxxxx(x)xxkxxCCCxxxx(x)xx[wfiv]gxxCexC

CDP: C12-13C0C0C10-11C2C

[0061] Motifs for FIG. 49:

1) Cxxxxxx[yfb]xxxxxWxxxx(xxxx)xxxCx(x)xCxCxx(xxxxxxxx)xxxxCxxxxCxx(xxxxx)xxCxxx(xxx)xxxxxxxgeCCx(x X)xC

2) CxxxxxxxxxxxxWxxxx(xxxx)xxxCx(x)xCxCxx(xxxxxxxx)xxxxCxxxxCxx(xxxxx)xxCxx(xxx)xxxxxxxxCCx(xx)xC

3) Cxxxxxxxxxxxxxxxxx(xxxx)xxxCx(x)xCxCxx(xxxxxxxx)xxxxCxxxxCxx(xxxxx)xxCxxx(xxx)xxxxxxxxCCx(xx)xC

[0062] Motifs for FIG. 50:

1) CxxxxxxCxxxxxCCxxxxCxxx(xxx)x(xx)x[wylfi]C

2) CxxxxxxCxxxxxCCxxxxCxxx(xxx)x(xx)xxC

CDP: C6C5C0C4C6-11C

[0063] Motifs for FIG. 51:

1) CxexCvxxxCxxxxxxGCxCxxxvC

2) CxxxCxxxxCxxxxxxxCxCxxxxC

CDP: C3C4C7C1C4C

[0064] Motifs for FIG. 52:

1) CxfCCxCCxxxxCgxCC

2) CxxCCxCCxxxxCxxCC

CDP: C2C0C1C4C2C0C

[0065] Motifs for FIG. 53:

1) CxxxxxWCgxxedCCCpmxCxxxWyxqxgxCqxxxxxxxxkxxC

2) CxxxxxWCxxxxxCCCxxxCxxxWxxxxxxCxxxxxxxxxxxxC

3) CxxxxxxCxxxxxCCCxxxCxxxxxxxxxxCxxxxxxxxxxxxC

CDP: C6C5C0C0C3C10C12C

[0066] Motifs for FIG. 54:

1) CxxCxxxCxxxxxxxxCxxx(xx)xCxC

[0067] Motifs for FIG. 55:

1) CxxxxxCxxxCxxxxx(x)xxxxxCxxxxCxC

2) CxxxxxCxxxCxxxxx(x)xxxgkCxxxkCxC

CDP: C5C3C10-11C4C1C

[0068] Motifs for FIG. 56:

1) CPxxxxxCxxdxdCxxxCxCxxxx(x)xC

2) CPxxxxxCxxxxxCxxxCxCxxxx(x)xC

2) CxxxxxxCxxxxxCxxxCxCxxxx(x)xC

CDP: C6C5C3C1C5-6C

[0069] Motifs for FIG. 57:

1) CCxdgxxxxx(x)xxxxCxxrxxxxxxxxxCxxxfxxCC

2) CCxxxxxxxx(x)xxxxCxxxxxxxxxxxxCxxxxxxCC

CDP: C0C12-13C12C6C0C

[0070] Motifs for FIG. 58:

1) CxsxxxPCxnxxxCCxgxCxxxxWxCxxxxxxCskxC

2) CxxxxxPCxxxxxCCxxxCxxxxWxCxxxxxxCxxxC

3) CxxxxxxCxxxxxCCxxxCxxxxxxCxxxxxxCxxxC

CDP: C6C5C0C3C6C6C3C

[0071] Motifs for FIG. 59:

1) CxxWx[wylf]xxCxxxxxdCgxgxrexx(xx)CxxxxxxxxCxxPC

2) CxxWxxxxCxxxxxxCxxxxxxxx(xx)CxxxxxxxxCxxPC

3) CxxxxxxxCxxxxxxCxxxxxxxx(xx)CxxxxxxxxCxxxC

CDP: C7C6C8-10C8C3C

[0072] Motifs for FIG. 60:

1) CxdxxxCxxygxyxxCxxCCxxxgxxxgxCxxxxCxC

2) CxxxxxCxxxxxxxxCxxCCxxxxxxxxxCxxxxCxC

CDP: C5C8C2C0C9C4C1C

[0073] Motifs for FIG. 61:

1) Cxxxxx(x)x(x)xxxxxCpxgxxxC[yf]xkxxxx(xx)CxxxxxxxxxGCxxtCPxxxx(x)xxxxxCCxxdxC

2) Cxxxxx(x)x(x)xxxxxCxxxxxxCxxxxxxxx(xx)CxxxxxxxxxGCxxxCPxxxx(x)xxxxxCCxxxxC

3) Cxxxxx(x)x(x)xxxxxCxxxxxxCxxxxxxx(xx)CxxxxxxxxxxCxxxCxxxxx(x)xxxxxCCxxxxC

CDP: C11-13C6C7-9C10C3C10-11C0C4C

[0074] Motifs for FIG. 62:

1) CPxxx(xx)xxxxxCxxx(xxx)CxxDxxCxxxxkCCxxxCxxxC

2) CPxxx(xx)xxxxxCxxx(xxx)CxxDxxCxxxxCCxxxCxxxC

3) Cxxxx(xx)xxxxxCxxx(xxx)CxxxxxCxxxxxCCxxxCxxxC

CDP: C9-11C3-6C5C5C0C3C3C

[0075] Motifs for FIG. 63:

1) Cxx(x)xyxxCxxgxxxCCxxr(x)xCxCxxxxxNCxC

2) Cxx(x)xxxxCxxxxxxCCxxx(x)xCxCxxxxxNCxC

3) Cxx(x)xxxxCxxxxxxCCxxx(x)xCxCxxxxxxCxC

CDP: C6-7C6C0C4-5C1C6C1C

[0076] Motifs for FIG. 64:

1) CxxxxxxCxdWxxxxCCxgxyCxCxxxpxCxC

2) CxxxxxxCxxWxxxxCCxxxxCxCxxxxxCxC

3) CxxxxxxCxxxxxxxCCxxxxCxCxxxxxCxC

CDP: C6C7C0C4C1C5C1C

[0077] Motifs for FIG. 65:

1) CxxxCrxxydxCxxCxgxWxgxxgxCxxhCxxxxxxCxxxC

2) CxxxCxxxxxxCxxCxxxWxxxxxxCxxxCxxxxxxCxxxC

3) CxxxCxxxxxxCxxCxxxxxxxxxxCxxxCxxxxxxCxxxC

CDP: C3C6C2C10C3C6C3C

[0078] Motifs for FIG. 66:

1) CxPxGxPCPyxxxCCxxxCxxxxxxxgxxxxrC

2) CxxxxxxCxxxxxCCxxxCxxxxxxxxxxxxxC

3) CxPxGxPCPxxxxCCxxxCxxxxxxxxxxxxxC

CDP: C6C5C0C3C13C

[0079] Motifs for FIG. 67:

1) CxxxxxxxxxxxCPxgxxxxxCxCgxxCgsWxxxxxxxCxCxCxxxdWxxxrCC

2) CxxxxxxxxxxxCPxxxxxxxCxCxxxCxxWxxxxxxxCxCxCxxxxWxxxxCC

3) CxxxxxxxxxxxCxxxxxxxxCxCxxxCxxxxxxxxxxCxCxCxxxxxxxxxCC

CDP: C11C8C1C3C10C1C1C9C0C

[0080] Motifs for FIG. 68:

1) Cx(xx)xxxCxxxxx[nd]gxCx[wylf]DGxDC

2) Cx(xx)xxxCxxxxxxxxCxxDGxDC

3) Cx(xx)xxxCxxxxxxxxCxxxxxxC

CDP: C4-6C8C6C

[0081] Motifs for FIG. 69:

1) Cxxxx[yf]xx(xx)xxx(x)xxCxxCxxCxx(xx)gxxxxxxCxxxxxtxC

2) Cxxxxxxx(xx)xxx(x)xxCxxCxxCxx(xx)xxxxxxxCxxxxxxxC

[0082] Motifs for FIG. 70:

1) CxfPFx[yf]xxxxxxxCtxxgxxxxxxWCxttxxxdxDxxxx[fy]C

2) CxxPFxxxxxxxxxCxxxxxxxxxxWCxxxxxxDxxxxxC

3) CxxxxxxxxxxxxxCxxxxxxxxxxxCxxxxxxxxxxxxxxC

CDP: C13C11C14C

[0083] Motifs for FIG. 71:

1) Cxx(xx)xxxxyxCCxxx(xx)xxxxxxdxxxxWgxxnxxwC

2) Cxx(xx)xxxxxxCCxxx(xx)xxxxxxxxxxxWxxxxxxxC

3) Cxx(xx)xxxxxxCCxxx(xx)xxxxxxxxxxxxxxxxxxxC

CDP: C8-10C0C22-24C

[0084] Motifs for FIG. 72:

1) CCxxxx(x)CxxxxpxxxCG

2) CCxxxx(x)CxxxxxxxxC

CDP: C0C4-5C8C

[0085] Motifs for FIG. 73:

1) CGGxxxxGxxxCxxgxxC

2) CGGxxxxGxxxCxxxxxC

CDP: C10C5C

[0086] Motifs for FIG. 75:

1) Cx(xxc)xxxCxxxxxxxCxpxx(xxxx)xxxx(c)xxxxxxxGCgCCxxCxxxxgxxCxxxxxx(dx)xxglxCxxg(xx)xxxxxlxC

2) Cx(xxc)xxxCxxxxxxxCxxxx(xxxx)xxxx(c)xxxxxxxGCxCCxxCxxxxxxxCxxxxxx(xx)xxxxxCxxx(xx)xxxxxxxC

3) Cx(xxc)xxxCxxxxxxxCxxxx(xxxx)xxxx(c)xxxxxxxxCxCCxxCxxxxxxxCxxxxxx(xx)xxxxxCxxx(xx)xxxxxxxC

[0087] Motifs for FIG. 76:

1) CxCxxxxdkeCx[yfli]xChxd[ivl][ivl]W

2) CxCxxxxdkeCx[yfli]xC

3) CxCxxxxxxxCxxxC

CDP: C1C7C3C

[0088] Motifs for FIG. 77:

1) CExCxxxxaCtGC

2) CExCxxxxxCxGC

3) CxxCxxxxxCxxC

CDP: C2C5C2C

[0089] Motifs for FIG. 78:

1) CyrxCWregxdeetCkerC

2) CxxxCWxxxxxxxxCxxxC

CDP: C3C9C3C

[0090] Motifs for FIG. 79:

1) DCxxxGxxCxGxxkxCCxpxxxCxxYanxC

2) CxxxGxxCxGxxxxCCxxxxxCxxYxxxC

3) CxxxxxxCxxxxxCCxxxxxCxxxxxxC

CDP: C6C5C0C5C6C

[0091] Motifs for FIG. 80:

1) CPx[ivlf]xxxCxxdxdCxxxCxCxxxxxxCg

2) CPxxxxxCxxxxxCxxxCxCxxxxxxC

3) CxxxxxxCxxxxxCxxxCxCxxxxxxC

CDP: C6C5C3C1C6C

[0092] Motifs for FIG. 81:

1) CdxgeqCaxrkgxrxgkxCdCPrgxxCnxfllkC

2) CxxxxxCxxxxxxxxxxxCxCxxxxxCxxxxxxC

CDP: C5C11C1C5C6C

[0093] Motifs for FIG. 82:

1) CvkkdelCxpyyxdCCxpxxCxxxxWWdhkC

2) CxxxxxxCxxxxxxCCxxxxCxxxxWWxxxC

3) CxxxxxxCxxxxxxCCxxxxCxxxxxxxxxC

CDP: C6C6C0C4C9C

[0094] Motifs for FIG. 83:

1) CxGxCsPFExPPCxssxCrCxPxlxxGxcxxPxxxxxxxkxxxHxnlCxsxxxCxkkxsGcFCxxYPNxxixxGWC

2) CxGxCxPFExPPCxxxxCxCxPxxxxxGxcxxPxxxxxxxxxxxxHxxxCxxxxxCxxxxxGxFCxxYPNxxxxxGWC

3) CxxxCxxxxxxxCxxxxCxCxxxxxxxxxcxxxxxxxxxxxxxxxxxxxCxxxxxCxxxxxxxxCxxxxxxxxxxGxC

[0095] Motifs for FIG. [85]:

1) CCPCxxCxYxxGCPWGqxxxxxgC

2) CCPCxxCxYxxGCPWGxxxxxxxC

3) CCxCxxCxxxxxCxxxxxxxxxxC

CDP: C0C1C2C5C10C

[0096] Motifs for FIG. 86:

1) CxgxxgxRxxxxxxxxxCxDCxNxxRxxxxxxxCrxxCxxxxxFxxC

2) CxxxxxxRxxxxxxxxxCxDCxNxxRxxxxxxxCxxxCxxxxxFxxC

3) CxxxxxxxxxxxxxxxxCxxCxxxxxxxxxxxxCxxxCxxxxxxxxC

CDP: C16C2C12C3C8C

[0097] Motifs for FIG. 87:

1) CxCxxxxPxxrxxxxxGxx(x)xxxxxC(x)xxxxxWxxCxxxxxxxxxCC

2) CxCxxxxPxxxxxxxxGxx(x)xxxxxC(x)xxxxxWxxCxxxxxxxxxCC

3) CxCxxxxxxxxxxxxxxxx(x)xxxxxC(x)xxxxxxxxCxxxxxxxxxCC

CDP: C1C21-22C8-9C9C0C

[0098] Motifs for FIG. 88:

1) CxxnCxqCkxmxgxxfxgxxCaxsCxkxxGkxxPxC

2) CxxxCxxCxxxxxxxxxxxxCxxxCxxxxGxxxPxC

3) CxxxCxxCxxxxxxxxxxxxCxxxCxxxxxxxxxxC

CDP: C3C2C12C3C10C

[0099] Motifs for FIG. 89:

1) CxxxCxxCxxxxxxxxxxxnxxxCxleCxxxxxxxxxWxxC

2) CxxxCxxCxxxxxxxxxxxxxxxCxxxCxxxxxxxxxWxxC

3) CxxxCxxCxxxxxxxxxxxxxxxCxxxCxxxxxxxxxxxxC

CDP: C3C2C15C3C12C

[0100] Motifs for FIG. 90:

1) CdxxxxxsxCqmxxxxCxxaxxCxxxieeCktsxxexC

2) CxxxxxxxxCxxxxxxCxxxxxCxxxxxxCxxxxxxxC

CDP: C8C6C5C6C7

[0101] Motifs for FIG. 91:

1) CxGxdrPCxxCCPCCPGxxCxxxexxgxxyC

2) CxGxxxPCxxCCPCCPGxxCxxxxxxxxxxC

3) CxxxxxxCxxCCxCCxxxxCxxxxxxxxxxC

CDP: C6C2C0C1C4C10C

[0102] Motifs for FIG. 92:

1) CxxxxxxCCxxxxxxCxxxxxCxxxxxxCxxxC

2) CgxxxxyCCsxxgxyCxwxxvCyxsxxxCxkxC

3) CxxxxxxCCxxxxxxCxxxxxCxxxxxxCxxxC

CDP: C6C0C6C5C6C3C

[0103] Motifs for FIG. 93:

1) CxxxxxCxxCxxxxxx(x)xCxWCxx(x)xxxCxxxx(xxxxxx)xCxxxx(xxxxxxxxx)xxxxxxC

2) CxxxxxCxxCxxxxxx(x)xCxxCxx(x)xxxCxxxx(xxxxxx)xCxxxx(xxxxxxxxx)xxxxxxC

CDP: C5C2C7-8C2C5-6C5-11C10-19C

[0104] Motifs for FIG. 95:

1) CxxxxxxxRxxCgxxxitxxxCxxxgCCfdxxxxxxxwC

2) CxxxxxxxRxxCxxxxxxxxxCxxxxCCxxxxxxxxxxC

3) CxxxxxxxxxxCxxxxxxxxxCxxxxCCxxxxxxxxxxC

CDP: C10C9C4C0C10C

[0105] Motifs for FIG. 96:

1) CsvtCgxGxxxRxrxCxxxx(pxx)xxxxxCxxxxxx(xxx)xxxC(x)xxxxC

2) CxxxCxxGxxxRxxxCxxxx(xxx)xxxxxCxxxxxx(xxx)xxxC(x)xxxxC

3) CxxxCxxxxxxxxxxCxxxx(xxx)xxxxxCxxxxxx(xxx)xxxC(x)xxxxC

CDP: C3C10C9-12C9-12C4-5C

[0106] Motifs for FIG. 97:

1) CxxCxCxx(x)sxppxCxCxDxxxx(x)C

2) CxxCxCxx(x)xxxxxCxCxDxxxx(x)C

3) CxxCxCxx(x)xxxxxCxCxxxxxx(x)C

CDP: C2C1C7-8C1C6-7C

[0107] Motifs for FIG. 99:

1) CxxCGPxxxGxCxGPxiCCGxxxGCxxGxxxxxxCxxexxxxxPCxxxxxxCxxxxGxCxxxGxCCxxxxCxxdxxC

2) CxxCGPxxxGxCxGPxxCCGxxxGCxxGxxxxxxCxxxxxxxxPCxxxxxxCxxxxGxCxxxGxCCxxxxCxxxxxC

3) CxxCxxxxxxxCxxxxxCCxxxxxCxxxxxxxxxCxxxxxxxxxCxxxxxxCxxxxxxCxxxxxCCxxxxCxxxxxC

CDP: C2C7C5C0C5C9C9C6C6C5C0C4C5C

[0108] Motifs for FIG. 101:

1) CDCGxxxxC(xx)xxxCC(x)xxxxCxlxxxxxCx(xx)xgxCCx(x)xCxxxxxxxxCrxxxx(x)xCxxxxxCxGxxxxC

2) CDCGxxxxC(xx)xxxCC(x)xxxxCxxxxxxxCx(xx)xxxCCx(x)xCxxxxxxxxCxxxxx(x)xCxxxxxCxGxxxxC

3) CxCxxxxxC(xx)xxxCC(x)xxxxCxxxxxxxCx(xx)xxxCCx(x)xCxxxxxxxxCxxxxx(x)xCxxxxxCxxxxxxC

CDP: C1C5C3-5C0C4-5C7C4-6C0C1-3C8C6-7C5C6C

[0109] Motifs for FIG. 102:

1) CCxxxxgxxxCCPxxxxxCCxDxxHCCPxgxxCxxxxxxC

2) CCxxxxxxxxCCPxxxxxCCxDxxHCCPxxxxCxxxxxxC

3) CCxxxxxxxxCCxxxxxxCCxxxxxCCxxxxxCxxxxxxC

CDP: C0C8C0C6C0C5C0C5C6C

[0110] Motifs for FIG. 104: 1) Cap(tCtxxxxCxxax)ₙ 2) Cap(xCxxxxxCxxxx)ₙ

[0111] Motifs for FIG. 105

1) Cxx(x)Cxx(xxxx)xxxxCxxxx(xxxx)xxxRCWxxxxxxCQxxxxxxCxxxCxx(x)xxCxxxxxxxCChxxCxggCx(xx)xPxx(x)x xCxaCxxfxxxgxCxxxCP

2) Cxx(x)Cxx(xxxx)xxxxCxxxx(xxxx)xxxRCWxxxxxxCQxxxxxxCxxxCxx(x)xxCxxxxxxxCCxxxCxgxCx(xx)xPxx(x)x xCxxCxxxxxxxxCxxxCP

3) Cxx(x)Cxx(xxxx)xxxxCxxxx(xxxx)xxxxCxxxxxxxCxxxxxxxCxxxCxx(x)xxCxxxxxxxCCxxxCxxxCx(xx)xxxx(x)xxC xxCxxxxxxxxCxxxC

[0112] Motifs for FIG. 106:

1) xxx[wyfl]xxxxCxCxCx

2) xxxxxxxxCxCxCx

[0113] Motifs for FIG. 110:

1) CxsxxxxxCxxxxxxx(xx)xxxxxCxx(x)xxxxCxxxxxx(x)xxxxrGCxxxxxxxxxxxCx(x)xxxxCxxCxxx(x)xCNxxxxxpxxxx xCxqCxgxxxxx[cx]xxxxxxlxxxxCxxxx(x)xxxxCyxxxxx(xxx)xxxxRGCxxxxxxxxx[cx]xdxxCxxC

2) CxxxxxxxCxxxxxxx(xx)xxxxxCxx(x)xxxxCxxxxxx(x)xxxxxGCxxxxxxxxxxxCx(x)xxxxCxxCxxx(x)xCNxxxxxxxxx xxCxxCxxxxxxx[cx]xxxxxxxxxxxCxxxx(x)xxxxCxxxxxx(xxx)xxxxRGCxxxxxxxxx[cx]xxxxCxxC

3) CxxxxxxxCxxxxxxx(xx)xxxxxCxx(x)xxxxCxxxxxx(x)xxxxxxCxxxxxxxxxxxCx(x)xxxxCxxCxxx(x)xCxxxxxxxxxxx xCxxCxxxxxxx[cx]xxxxxxxxxxxCxxxx(x)xxxxCxxxxxx(xxx)xxxxxxCxxxxxxxxx[cx]xxxxCxxC

[0114] Motifs for FIG. 111: xxxxxxCxxxxxx(x)Ctxxx(xx)xg(x)xxCxxxxxxCxxyxxxxxCxxxx(xx)xxxxxCxWxxxx(x)xxCxxxx(xxxx)Cx

[0115] Motif for FIG. 113:

1) nxCtxdxCxxxxgCxxxxxxCxxx

2) CxxxxCxxxxxCxxxxxxCxxx

CDP: C4C5C6C3

[0116] Motif for FIG. 114: xxxx[cx]xxCxxx[cx]xxCxxxCxxxx

[0117] Motif for FIG. 210: xxCxxxCxxxCxx(x)xCxxCDP: 2C3C3C3-4C2

[0118] Motif for FIG. 123:

[0119] 1) CtxxGxxxC(vilm)CxGxxxCGxGxxCxxxxxGxxnxC

[0120] 2) CxxxGxxxCxCxGxxxCGxGxxCxxxxxGxxxxC

[0121] 3) CxxxxxxxCxCxxxxxCxxxxxCxxxxxxxxxxC

CDP: C7C1C5C5C10C

[0122] Motif for FIG. 162:

[0123] 1) CxxxxCxxxxxCxxx(x)xxxxxxCx(x)CxxxCxxxxxx(x)xxxCxxdxxtyxxxCxxxxaxCxxxxxxxxxxxgxC

[0124] 2) CxxxxCxxxxxCxxx(x)xxxxxxCx(x)CxxxCxxxxxx(x)xxxCxxxxxxxxxxCxxxxxxCxxxxxxxxxxxxxC

CDP: C4C5C9-10C1-2C3C9-10C10C6C13C

[0125] FIG. 13 depicts the prevalence profile of amino acids in proteins.

[0126] FIGS. 17-18, 74, 84, 94, 98, 100 depict the primary and secondary structures of exemplary sequences.

[0127] FIGS. 19 and 36 depict sequence alignments amongst various invertebrate and plant proteins.

[0128] FIG. 103 depicts the sequence and tertiary structure of granulin.

[0129] FIG. 107 depicts CXC motif repeats.

[0130] FIG. 108 depicts the sequence of VEGF C-terminal domain and balbani ring secreted protein.

[0131] FIG. 109 depicts the putative structure of a cysteine-containing repeat.

[0132] FIGS. 112 and 116 depict sequences of exemplary cysteine-containing repeat protein.

[0133] FIG. 117 depicts the structure of an exemplary anti-freeze protein.

[0134] FIG. 118 depicts the structure of erabutoxin.

[0135] FIG. 119 depicts the structure of plexin.

[0136] FIG. 120 depicts the sequence of plexin.

[0137] FIG. 121 depicts the structure of somatometin.

[0138] FIG. 122 depicts an SDS-PAGE gel separating expressed microproteins by molecular weight.

[0139] FIG. 124 depicts an affinity maturation scheme for cysteine-rich repeat proteins.

[0140] FIG. 125 depicts the structures of granulin repeat proteins.

[0141] FIG. 126 depicts a scheme for randomization.

[0142] FIG. 127 depicts the structures sand sequences of anti-freeze protein-derived repeat proteins.

[0143] FIG. 128 depicts a design of spiral repeat protein scaffolds.

[0144] FIG. 129 depicts a scheme for affinity maturation of repeat proteins.

[0145] FIGS. 130-132 depict cysteine-containing repeat protein nomenclatures.

[0146] FIG. 133 depicts repeat proteins derived from A-domains.

[0147] FIG. 134 depicts poly-trefoil scaffolds.

[0148] FIG. 135 depicts multi-plexin scaffolds.

[0149] FIG. 136 depicts minicollagen scaffolds.

[0150] FIGS. 137-142, 160 depict various schemes for affinity maturation.

[0151] FIG. 143 depicts plasmid cycling and megaprimers.

[0152] FIG. 144 is a hydrophobicity plot.

[0153] FIG. 145 depicts various was to enlarge small cysteine-containing domains.

[0154] FIGS. 146-147 depict various ways to connect different structures using anti-freeze proteins.

[0155] FIG. 148 depicts a strategy for designing libraries.

[0156] FIG. 149 depicts an A-domain structure.

[0157] FIG. 150 is a schematic representation of target-induced folding of microproteins.

[0158] FIG. 151 depicts the structural organization and sequence of the follistatin domain.

[0159] FIGS. 152-153 depicts structural diversity of cysteine-containing proteins.

[0160] FIGS. 154-155 depict structural evolution by disulfide shuffling and evolution of natural cysteine-containing proteins.

[0161] FIG. 156 depicts families of 508 disulfide containing proteins.

[0162] FIG. 157 depicts sequence relationship between different integrins.

[0163] FIG. 158 depicts a comparison of various product formats.

[0164] FIG. 159 depicts various microprotein product formats.

[0165] FIG. 161 depicts mechanisms for reducing immunogenicity.

[0166] FIG. 162 depicts a gel showing expression of various scaffolds from E. coli.

[0167] FIG. 163 depicts combinational reduction of HLA-binding.

[0168] FIG. 164 depicts sequences and structures of various TNFR family microproteins.

[0169] FIG. 165 depicts the 2-3-4 build-up approach.

[0170] FIG. 166 depicts predicted MHCII binding affinity of human and microproteins. The graph shows the distribution of scores for each protein calculated for five major HLA alleles. Red curve: 26,000 full length human proteins of median length 372AA. Blue curve: 10,525 microproteins of 25-90AA (medan 38AA) with at least 10% cysteine and an even number of cysteines, taken from a database of disulfide patterns (22). Green curve: 26,000 human protein fragments that match the size distribution of the microprotein data base. For each human protein sequence we randomly generated a fragment that matched the length of a randomly chosen protein from our microprotein data base. .MHCII binding was analyzed for 5 HLA alleles that occur with high frequency in the caucasian population, HLA*101, HLA*301, HLA*401, HLA*701, HLA*1501. MHCII binding matrices based on TEPITOPE were used. Binding matrices were downloaded from the program ProPred. TEPITOPE matrices do not contain scores for cysteine residues and alanine scores were used instead. For each protein and each HLA allele we identified the highest TEPITOPE score. Data for each allele were normalized by subtracting the average of the highest scores for all human proteins

[0171] FIG. 167 top panel shows affinity contribution of amino acids to MHCII binding. The P1 scores of all non-hydrophobic residues in the TEPITOPE matrices were changed from −999 to −2 to prevent the P1 score from dominating the average score. Amino acids were ranked according to their average score for each epitope. The figure shows the average ranks for the 5 most prevalent HLA alleles (*101, *301, *401, *701, *1501). The bottom panel shows relative abundance of amino acids in microproteins versus human proteins. Amino acid abundances were calculated for human proteins and microproteins using sequences as given in FIG. 166. The data show that the aliphatic hydrophobic residues I,V,M,L have the strongest contribution to immunogenicity and are the most underrepresented in microproteins compared to average human proteins. Reduction of the immunogenicity of proteins can thus be achieved by reducing the content of high-scoring amino acids, in the following rank order from high to low: IVMLFYSNRAHQTGWKPED.

[0172] FIG. 168 depicts the ELISA results of VEGF microproteins expressed from phage clones as a demonstration of the 2-3-4 build-up approach.

[0173] FIG. 169 depicts an SDS-PAGE gel of microproteins under reducing conditions. Lane 1: somatomedin, lane 2: plexin, lane 3: toxin B, lane 4: potato protease inhibitor, lane 5: spider toxin, lane 6: alkaline phosphatase control, lane 9: molecular weight marker.

[0174] FIG. 170 depicts a comparison of redox-treated libraries and untreated libraries

### INCORPORATION BY REFERENCE

[0175] All publications and patent applications mentioned in this specification are herein incorporated by reference for all purposes to the same extent as if each individual publication or patent application was specifically and individually indicated to be incorporated by reference.

### DETAILED DESCRIPTION OF THE INVENTION

[0176] All publications and patent applications mentioned in this specification are herein incorporated by reference for all purposes to the same extent as if each individual publication or patent application was specifically and individually indicated to be incorporated by reference for all purposes.

[0177] While preferred embodiments of the present invention have been shown and described herein, it will be obvious to those skilled in the art that such embodiments are provided by way of example only. Numerous variations, changes, and substitutions will now occur to those skilled in the art without departing from the invention. It should be understood that various alternatives to the embodiments of the invention described herein may be employed in practicing the invention.

General Techniques

[0178] The practice of the present invention employs, unless otherwise indicated, conventional techniques of immunology, biochemistry, chemistry, molecular biology, microbiology, cell biology, genomics and recombinant DNA, which are within the skill of the art. See Sambrook, Fritsch and Maniatis, MOLECULAR CLONING: A LABORATORY MANUAL, 2^{nd} edition (1989); CURRENT PROTOCOLS IN MOLECULAR BIOLOGY (F. M. Ausubel, et al. eds., (1987)); the series METHODS IN ENZYMOLOGY (Academic Press, Inc.): PCR 2: A PRACTICAL APPROACH (M. J. MacPherson, B. D. Hames and G. R. Taylor eds. (1995)), Harlow and Lane, eds. (1988) ANTIBODIES, A LABORATORY MANUAL, and ANIMAL CELL CULTURE (R. I. Freshney, ed. (1987)).

Definitions

[0179] The term “protein” refers to polymers of amino acids of any length. The polymer may be linear or branched, it may comprise modified amino acids, and it may be interrupted by non-amino acids. The terms also encompass an amino acid polymer that has been modified; for example, disulfide bond formation, glycosylation, lipidation, acetylation, phosphorylation, or any other manipulation, such as conjugation with a labeling component. As used herein the term “amino acid” refers to either natural and/or unnatural or synthetic amino acids, including glycine and both the D or L optical isomers, and amino acid analogs and peptidomimetics. Proteins may comprise one or more domains.

[0180] The term ‘domain’ refers to as a single, stable three-dimensional structure, regardless of size. The tertiary structure of a typical domain is stable in solution and remains the same whether such a member is isolated or covalently fused to other domains. A domain as defined here has a particular tertiary structure formed by the spatial relationships of secondary structure elements, such as beta-sheets, alpha helices, and unstructured loops. In domains of the microprotein family, disulfide bridges are generally the primary elements that determine tertiary structure. In some instances, domains are modules that can confer a specific functional activity, such as avidity (multiple binding sites to the same target), multi-specificity (binding sites for different targets), halflife (using a domain, cyclic peptide or linear peptide) which binds to a serum protein like human serum albumin (HSA) or to IgG (hIgG1,2,3 or 4) or to red blood cells.

[0181] The ‘loops’ are the inter-cysteine sequences that contribute to the affinity and specificity of the interaction with the target, and their amino acid composition also affect the solubility of the protein which is important for high concentration formulations, such as those used in oral, intestinal, transdermal, nasal, pulmonary, blood-brain-barrier, home injection and other routes and formats of administration.

[0182] The term ‘microproteins’ refers to a classification in the SCOP database. Microproteins are usually the smallest proteins with a fixed structure and typically but not exclusively have as few as 15 amino acids with two disulfides or up to 200 amino acids with more than ten disulfides. A microprotein may contain one or more microprotein domains. Some microprotein domains or domain families can have multiple more-or-less stable and multiple more or less similar structures which are conferred by different disulfide bonding patterns, so the term stable is used in a relative way to differentiate microproteins from peptides and non-microprotein domains. Most microprotein toxins are composed of a single domain, but the cell-surface receptor microproteins often have multiple domains. Microproteins can be so small because their folding is stabilized either by disulfide bonds and/or by ions such as Calcium, Magnesium, Manganese, Copper, Zinc, Iron or a variety of other multivalent ions, instead of being stabilized by the typical hydrophobic core.

[0183] The term ‘scaffold’ refers to the minimal polypeptide ‘framework’ or ‘sequence motif’ that is used as the conserved, common sequence in the construction of protein libraries. In between the fixed or conserved residues/positions of the scaffold lie variable and hypervariable positions. A large diversity of amino acids is provided in the variable regions between the fixed scaffold residues to provide specific binding to a target molecule. A scaffold is typically defined by the conserved residues that are observed in an alignment of a family of sequence-related proteins. Fixed residues may be required for folding or structure, especially if the functions of the aligned proteins are different. A full description of a microprotein scaffold may include the number, position or spacing and bonding pattern of the cysteines, as well as position and identity of any fixed residues in the loops, including binding sites for ions such as Calcium.

[0184] The ‘fold’ of a microprotein is largely defined by the linkage pattern of the disulfide bonds (i.e., 1-4, 2-6, 3-5). This pattern is a topological constant and is generally not amenable to conversion into another pattern without unlinking and relinking the disulfides such as by reduction and oxidation (redox agents). In general, natural proteins with related sequences adopt the same disulfide bonding patterns. The major determinants are the cysteine distance pattern (CDP) and some fixed non-cys residues, as well as a metal-binding site, if present. In few cases the folding of proteins is also influenced by the surrounding sequences (ie pro-peptides) and in some cases by chemical derivatization (ie gamma-carboxylation) of residues that allow the protein to bind divalent metal ions (ie Ca++) which assists their folding. For the vast majority of microproteins such folding help is not required.

[0185] However, proteins with the same bonding pattern may still comprise multiple folds, based on differences in the length and composition of the loops that are large enough to give the protein a rather different structure. An example are the conotoxin, cyclotoxin and anato domain families, which have the same DBP but a very different CDP and are considered to be different folds. Determinants of a protein fold are any attributes that greatly alter structure relative to a different fold, such as the number and bonding pattern of the cysteines, the spacing of the cysteines, differences in the sequence motifs of the inter-cysteine loops (especially fixed loop residues which are likely to be needed for folding, or in the location or composition of the calcium (or other metal or co-factor) binding site.

[0186] The term ‘disulfide bonding pattern’ or ‘DBP’ refers to the linking pattern of the cysteines, which are numbered 1-n from the N-terminus to the C-terminus of the protein. Disulfide bonding patterns are topologically constant, meaning they can only be changed by unlinking one or more disulfides such as using redox conditions. The possible 2-, 3-, and 4-disulfide bonding patterns are listed below in paragraphs 0048-0075.

[0187] The term ‘cysteine distance pattern’ or ‘CDP’ refers to the number of non-cysteine amino acids that separate the cysteines on a linear protein chain. Several notations are used: C5C0C3C equals C5CC3C equals CxxxxxCCxxxC.

[0188] The term ‘Position n6’ or ‘n7=4’ refers to the intercysteine loops and ‘n6’ is defined as the loop between C6 and

C7; ‘n7=4’ means the loop between C7 and C8 is 4 amino acids long, not counting the cysteines.

[0189] The term ‘reductive unfolding’ involves the unfolding of a folded protein in the presence of a reducing agent (e.g. dithiothreitol). ‘Oxidative refolding’ involves the folding pathway from the fully unfolded and reduced state in the presence of oxidizing agent.

[0190] The term ‘complex’ refers to a cysteine bonding pattern in which the cysteines are disulfide bonded to cysteines that, on average, are separated by many amino acid positions on the linear alpha-chain backbone. ‘Complexity’ is quantified as the total (cumulative) linear backbone distance that the disulfides span. For example, the maximum for a 3-disulfide topology is 9 (1-4 2-5 3-6=3+3+3), and the minimum is 3 (i.e., 1-2 3-4 5-6). Complex patterns appear to offer more different folds due to length diversity but occur less frequently than less complex patterns. For example, the highest number of natural sequence families and the most rigid structure is observed for the patterns 1-4 2-5 3-6, 1-6 2-4 3-5, 1-5 2-4 3-6 and 1-4 2-6 3-5. All of these are the most complex pattern (complexity score of 9 on a 3-9 scale of 3SS proteins), showing that the more complex topologies appear to be able to yield more different cysteine spacings, ie more folds. Therefore, eliminating or reducing the frequency of simple disulfide bonding patterns (like 1-2 3-4 5-6) is expected to increase the average number of folds (i.e., very different cys-spacings, like conotoxin versus cyclotide versus anato) that is formed for each disulfide bonding pattern. A simple way to remove the majority of simple bonding patterns is to use loop lengths that are less than about 9 amino acids, since in natural proteins the minimum distance between cys residues that are disulfide-linked (called ‘span’) is generally about 9 amino acids. The complexity of 2SS proteins ranges from 2-4, and of 4SS proteins it is 4-16, and for 5SS proteins it ranges from 5-25.

[0191] The term ‘span’ of a disulfide bond refers to the amino acid distance between linked cysteines, excluding the cysteines themselves. The average span is 10-14AA, preferably about 12, as shown below in table 1. Spacing of cysteines such that multiples of 11-14aa are maximized can be used to encourage structural diversity by eliminating proximal disulfides (formed between neighboring cysteines) and by providing a large number of combinations of cysteine residues that have a span of about 12 amino acids (as well as 18, 24, etc). An example would be CX₆CX₆CX₆CX₆CX₆C (‘3×6’), CX₆CX₆CX₆CX₆CX₆CX₆CX₆C (‘4×6’), CX₅CX₅CX₅CX₅CX₅C (‘3×5’), CX₅CX₅CX₅CX₅CX₅CX₅CX₅C (‘4×5’), or similar motifs with a combination of loops ranging from 5-6, 4-7 or 3-8 amino acids. CX₆C and CX₅C are generally too short to allow the two adjacent cysteines to bond (minimum span is typically about 9 amino acids), preventing the formation of a cyclic peptide structure that is sometimes called a ‘sub-domain’ or ‘micro-domain’ but is generally not considered to be a full domain. Certain exemplary disulfide spans is show in the table below.

TABLE 1
Disulfide Span

| | C1-C6 distance | Disulfide Span (aa) | | |
|---|---|---|---|---|
| Family | (in aa) | 1 | 2 | 3 |
| A | 39 | 11 | 11 | 15 |
| EGF | 37 | 11 | 13 | 10 |
| TNFR | 42 | 12 | 12 | 17 |
| Kunitz | 52 | 50 | 23 | 20 |
| Notch | 34 | 23 | 12 | 15 |
| DSL | 43 | 24 | 15 | 28 |
| Trefoil | 40 | 19 | 14 | 16 |
| TSP1 | 45 | 33 | 36 | 10 |
| Anato | 37 | 25 | 31 | 19 |
| Thyroglobulin | 81 | 32 | 9 | 20 |
| Defensin 1 | 29 | 27 | 14 | 19 |
| Cyclotide | 24 | 16 | 14 | 14 |
| SHKT | 42 | 35 | 24 | 12 |
| Conotoxin | 29 | 15 | 13 | 10 |
| Toxin 2 | 29 | 20 | 21 | 15 |

[0192] The term “Cysteine-Rich Repeat Protein (‘CRRP’)” refers to a protein that typically but not exclusively has a single polypeptide chain and comprises ‘repeat units’ (also called ‘modules’, ‘repeats’ or ‘building blocks’) of a particular conserved amino acid sequence (‘repeat pattern’ or ‘repeat motif’) with a cysteine content of more than about 1%, preferably more than about 5% or even 10%. This family is unrelated in sequence from the Leucine-rich Repeat Proteins, which include the Ankyrin family. CRRP units interact with each other, resulting in one large domain that folds independently of other domains. CRRPs can be adjusted in size by adding or deleting repeat units. Preferred repeat proteins include but are not limited to head-to-tail repeats of the same motif, that are generally distinguishable from single repeats that are separated by unrelated sequences.

[0193] As used herein, the term “pharmaceutically acceptable carrier” encompasses any of the standard pharmaceutical carriers, such as a phosphate buffered saline solution, water, and emulsions, such as an oil/water or water/oil emulsion, and various types of wetting agents. The compositions also can include stabilizers and preservatives. For examples of carriers, stabilizers and adjuvants, see Martin, REMINGTON'S PHARM. SCI., 15th Ed. (Mack Publ. Co., Easton (1975).

[0194] A “pharmaceutical composition” is intended to include the combination of an active agent with a carrier, inert or active, making the composition suitable for diagnostic or therapeutic use in vitro, in vivo or ex vivo.

[0195] The term “non-naturally occurring” as applied to a nucleic acid or a protein refers to a nucleic acid or a protein that is not found in nature. Examples of non-naturally occurring nucleic acids and proteins include but are not limited to those that have been modified recombinantly.

Design of Cysteine-Containing Proteins and Protein Libraries

[0196] As detailed below, one aspect of the present invention is to create protein libraries with vast structural diversity from which one can select and evolve binding proteins with desired properties for a wide variety of utilities, including but not limited to therapeutic, prophylactic, veterinary, diagnostic, reagent or material applications.

[0197] In one embodiment, the present invention provides cysteine-containing protein libraries with at least 2, 3, 4, 5, 10, 30, 100, 300, 1000, 3000, 10000 or more different structures that preferably are topologically distinct. In certain embodiments, the cysteine-containing protein libraries comprise high disulfide density (HDD) proteins. Proteins of the HDD family typically have 5-50% (5, 6, 7, 8, 9, 10, 12, 14, 16, 18, 20, 25, 30, 35, 40, 45 or 50%) cysteine residues and each domain typically contains at least two disulfides and optionally a co-factor such as calcium or another ion.

[0198] The presence of HDD scaffold allows these proteins to be small but still adopt a relatively rigid structure. Rigidity is important to obtain high binding affinities, resistance to proteases and heat, including the proteases (see below for classification of proteases) involved in antigen processing, and thus contributes to the low or non-immunogenicity of these proteins. The disulfide framework folds the protein without the need for a large number of hydrophobic side chain interactions in the interior of most proteins, called the hydrophobic core. All non-HDD scaffolds have a hydrophobic core which is a frequent source of specificity or folding problems. HDD proteins tend to be more hydrophilic than non-HDD proteins leading to improved binding specificity. The small size is also advantageous for fast tissue penetration and for alternative delivery such as oral, nasal, intestinal, pulmonary, blood-brain-barrier, etc. In addition, the small size also helps to reduce immunogenicity. A higher disulfide density is obtainable, either by increasing the number of disulfides or by using domains with the same number of disulfides but fewer amino acids. It is also desirable to decrease the number of non-cysteine fixed residues, so that a higher percentage of amino acids is available for target binding.

[0199] The disulfide framework allows extreme sequence diversity within each family in the intercysteine loops. Between families there exists vast variation in loop length and cysteine spacing. Due to the combinatorial nature of disulfide bond formation, the disulfide framework enables the formation of large numbers of different bonding patterns and different structures, and because folding can be heterogeneous, a gradual evolutionary path exists to optimize structures and sequences by directed evolution. The HDD proteins in particular are predicted to have the unique ability to allow a single sequence to adopt multiple different stable folds.

[0200] In order to generate a wide range of disulfide bonding patterns, the library can be subjected to a range of different conditions that may favor different isomers with different disulfide bonding patterns (DBPs). For example, one can exploit the redox potential of a solvent, which is determined by the relative concentration and strength of reducing and oxidizing agents, to effect formation of different DBPs. To create a reducing solvent, one can employ a variety of reducting agents including but not limited to 2-mercaptoethanol (beta-mercaptoethanol, BME), 2-mercaptoethylamine-HCl, TCEP (Tris(2-carboxyethyl) phosphine), Sodium borohydride, dithiothreitol (DTT, reduced form), reduced form of glutathione (GSH), and reduced form of cysteine. To create an oxidative solvent, one can employ a variety of oxidizing agents including without limitation dithiothreitol (DTT, oxidized form), hydrogen peroxide, glutathione (oxidized form, GSSG), copper phenanthroline (oxidized form), oxygen (air), trace metals and oxidized form of cysteine (cystine).

[0201] Particularly useful are mixtures and gradients of redox reagents that allow the protein to repeatedly form and break disulfides, sufficiently rapid to allow exploration of a vast diversity of disulfide bonding patterns and allowing stable forms to accumulate over time. If one wants maximum diversity of DBPs rather than stability, one can prevent a mixture from coming to equilibrium. Conditions that favor a large diversity of structures (fully reduced, high temperature) are suddenly changed into highly oxidizing, low temperature conditions such that the structures form with insufficient time to find the most stable DBP. An alternative approach to create structural diversity is to slowly form disulfides under a diversity of conditions, such as different chemicals (i.e., volume excluders like polyethyleneglycol, which accelerate formation of slow/difficult disulfide bonds with cysteines that are located far apart), different solvents (polar, non-polar, alcohols), different metal ions (Ca, Zn, Cu, Fe Mg, others) or different pHs (pH1,2,3,4,5,6,7,8,9,10,11,12). This variety of conditions alone or in any combination can be used to make the same protein sequence adopt a variety of alternative folds.

[0202] The formation of the disulfides and/or the presence of the co-factor can be easily controlled by providing reducing or oxidizing agents or by addition of a co-factor.

[0203] The ability of a protein to fold into multiple alternative stable structures will typically depend on the number and strength of the intra-protein bonding interactions as well as the properties of the available folding pathway(s). In the absence of disulfides, a large number of weak side chain contacts (salt bridges, van der Waals contacts, hydrophobic interactions, etc) are typically required to obtain a stably folded protein. Thus, many residues would need to be modified in order to direct the formation of a different, alternative stable fold or for binding to a target. In contrast, only a few (e.g., two or three) disulfide bonds are sufficient to give a protein a stable structure, leaving all of the other amino acid positions (typically around 65-80%) available to create binding surfaces for a desired target (conotoxins, at over 80%, are the most extreme example of this). Disulfides are thus a low information content approach (i.e., high frequency of occurrence in random sequences) to structure, leaving a maximum fraction of amino acids available for binding and various other functions.

[0204] The folding pathway and stability of a large, non-disulfide-containing protein require a large number of amino acid side chain interactions such that a large fraction of the residues must be more or less fixed, and therefore the ability of the protein to adapt its sequence is greatly reduced. This situation typically occurs in larger scaffold proteins, such as immunoglobulins, fibronectin and lipocalins, where usually only a few CDR-like loops can be randomized without causing misfolding, which for proteins such as these, containing a hydrophobic core, generally means irreversible protein aggregation. A single disulfide bridge, introduced by a couple of mutations, can take over the structural function of a large number of amino acid residues, freeing their sequence up to evolve towards a different purpose, such as binding to a desired protein target. Even in non-HDD proteins, the gradual addition of disulfides may play a key role in allowing the protein to continue to evolve towards increased complexity. Cysteine (C) appears to have been added late to the repertoire of 20 biological amino acids and the frequency of cysteines was shown to be rising gradually during protein evolution.

[0205] In addition, disulfide-mediated folding allows a protein to be more hydrophilic (because it replaces a hydrophobic core) and misfolding of such a protein generally does not lead to irreversible aggregation but allows the protein to stay soluble and renate eventually.

[0206] A unique feature of disulfides is that the same set of cysteines can, in principle, be linked in a variety of alternative disulfide bonding patterns, since disulfides are combinatorial. For example, two-disulfide proteins can have three different disulfide bonding patterns (DBPs), three-disulfide proteins can have 15 different DBPs and four-disulfide proteins have up to 105 different DBPs. Natural examples exist for all of the 2SS DBPs, the majority of the 3SS DBPs and less than half of the 4SS DBPs. In one aspect, the total number of disulfide bonding patterns can be calculated according to the formula:

$${\prod }_{i = 1}^{n} 2 i - 1 ,$$

wherein n=the predicted number of disulfide bonds formed by the cysteine residues, and wherein Π represents the product of (2i−1), where i is a positive integer ranging from 1 up to n.

[0207] Accordingly, in one embodiment, the present invention provides a non-naturally occurring cysteine (C)-containing scaffold exhibiting a binding specificity towards a target molecule, wherein the non-naturally occurring cysteine (C)-containing scaffold comprise intra-scaffold cysteines according to a pattern selected from the group of permutations represented by the formula

$${\prod }_{i = 1}^{n} 2 i - 1 ,$$

wherein n equals to the predicted number of disulfide bonds formed by the cysteine residues, and wherein Π represents the product of (2i−1), where i is a positive integer ranging from 1 up to n. In one aspect, the non-naturally occurring cysteine (C)-containing protein comprises a polypeptide having two disulfide bonds formed by pairing cysteines contained in the polypeptide according to a pattern selected from the group consisting of C^{1-2, 3-4}, C^{1-3, 2-4}, and C^{1-4, 2-3}, wherein the two numerical numbers linked by a hyphen indicate which two cysteines counting from N-terminus of the polypeptide are paired to form a disulfide bond. In another aspect, the non-naturally occurring cysteine (C)-containing scaffold comprises a polypeptide having three disulfide bonds formed by pairing intra-scaffold cysteines according to a pattern selected from the group consisting of C^{1-2, 3-4, 5-6}, C^{1-2, 3-5, 4-6}, C^{1-2, 3-6, 4-5}, C^{1-3, 2-4, 5-6}, C^{1-3, 2-5, 4-6}, C^{1-3, 2-6, 4-5}, C^{1-4, 2-3, 5-6}, C^{1-4, 2-6, 3-5}, C^{1-5, 2-3, 4-6}, C^{1-5, 2-4, 3-6}, C^{1-5, 2-6, 3-4}, C^{1-6, 2-3, 4-5}, and C^{1-6, 2-5, 3-4}, wherein the two numerical numbers linked by a hyphen indicate which two cysteines counting from N-terminus of the polypeptide are paired to form a disulfide bond. In another aspect, the non-naturally occurring cysteine (C)-containing protein comprises a polypeptide a non-naturally occurring cysteine (C)-containing protein exhibiting a binding specificity towards a target molecule, comprising a polypeptide having at least four disulfide bonds formed by pairing cysteines contained in the polypeptide according to a pattern selected from the group of permutations defined by the formula above. In yet another aspect, the non-naturally occurring cysteine (C)-containing protein comprises a polypeptide having at least five disulfide bonds formed by pairing intra-protein cysteines according to a pattern selected from the group consisting of C¹⁻⁹, C¹⁻¹⁰, C²⁻⁹, C²⁻¹⁰, C³⁻⁹, C³⁻¹⁰, C⁴⁻⁹, C⁴⁻¹⁰, C⁵⁻⁹, C⁵⁻¹⁰, C⁶⁻⁹, C⁶⁻¹⁰, C⁷⁻⁹, C⁷⁻¹⁰, C⁸⁻⁹, C⁸⁻¹⁰, and C⁹⁻¹⁰, wherein the two numerical numbers linked by a hyphen indicate which two cysteines counting from N-terminus of the polypeptide are paired to form a disulfide bond. In yet another aspect, the non-naturally occurring cysteine (C)-containing protein exhibiting a binding specificity towards a target molecule, comprising a polypeptide having at least six disulfide bonds formed by pairing intra-protein cysteines according to a pattern selected from the group consisting of C¹⁻¹¹, C¹⁻¹², C²⁻¹¹, C²⁻¹², C³⁻¹¹, C³⁻¹², C⁴⁻¹¹, C⁴⁻¹², C⁵⁻¹¹, C⁵⁻¹², C⁶⁻¹¹, C⁶⁻¹², C⁷⁻¹¹, C⁷⁻¹², C⁸⁻¹¹, C⁸⁻¹², and C⁹⁻¹¹, C⁹⁻¹², C¹⁰⁻¹¹, C¹⁰⁻¹², and C¹¹⁻¹², wherein the two numerical numbers linked by a hyphen indicate which two cysteines counting from N-terminus of the polypeptide are paired to form a disulfide bond.

[0208] Typically all of the cysteines are involved in disulfide bonding to other cysteines in the same domain. Microproteins with 2 disulfides (2SS) can adopt three different topologically distinct (ie not interconvertible by simple rotation) disulfide bonding patterns: 1-2 3-4, 1-3 2-4 or 1-4 2-3, each having a different alpha-chain backbone structure.

[0209] Similarly, microproteins with three disulfides can have up to 15 different disulfide bonding patterns, microproteins with 4 disulfides can have up to 105 disulfide bonding patterns, microproteins with 5 disulfides can have up to 945 disulfide bonding patterns, microproteins with 6 disulfides can have up to 10,395 disulfide bonding patterns and proteins with 7 disulfides can have up to 135,135 different bonding patterns, and so on for higher disulfide numbers (multipliers are 3,5,7,9,11,13-fold). The following lists the disulfide bonding patterns (DBP) for proteins with two, three or four disulfide bonds.

[0210] The 3 DBPs patterns for 2SS proteins are:
[0211] 1-2 3-4, 1-3 2-4, 1-4 2-3

[0212] The 15 DBPs for 3SS proteins are:
[0213] 1-6 2-5 3-4, 1-4 2-5 3-6, 1-6 2-4 3-5, 1-5 2-6 3-4, 1-5 2-4 3-6, 1-4 2-6 3-5, 1-2 3-4 5-6, 1-2 3-5 4-6, 1-2 3-6 4-5, 1-6 2-3 4-5, 1-4 2-3 5-6, 1-5 2-3 4-6, 1-3 2-6 4-5, 1-3 2-4 5-6, 1-3 2-5 4-6.

[0214] The 105 DBPs for 4SS proteins are:

| | | | | | |
|---|---|---|---|---|---|
| 1-2 3-4 5-6 7-8 | 1-2 3-4 5-7 6-8 | 1-2 3-4 5-8 6-7 | 1-2 3-5 4-6 7-8 | 1-2 3-5 4-7 6-8 | 1-2 3-5 4-8 6-7 |
| 1-2 3-6 4-5 7-8 | 1-2 3-6 4-7 5-8 | 1-2 3-6 4-8 5-7 | 1-2 3-7 4-5 6-8 | 1-2 3-7 4-6 5-8 | 1-2 3-7 4-8 5-6 |
| 1-2 3-8 4-5 6-7 | 1-2 3-8 4-6 5-7 | 1-2 3-8 4-7 5-6 | 1-3 2-4 5-6 7-8 | 1-3 2-4 5-7 6-8 | 1-3 2-4 5-8 6-7 |
| 1-3 2-5 4-6 7-8 | 1-3 2-5 4-7 6-8 | 1-3 2-5 4-8 6-7 | 1-3 2-6 4-5 7-8 | 1-3 2-6 4-7 5-8 | 1-3 2-6 4-8 5-7 |
| 1-3 2-7 4-5 6-8 | 1-3 2-7 4-6 5-8 | 1-3 2-7 4-8 5-6 | 1-3 2-8 4-5 6-7 | 1-3 2-8 4-6 5-7 | 1-3 2-8 4-7 5-6 |
| 1-4 2-3 5-6 7-8 | 1-4 2-3 5-7 6-8 | 1-4 2-3 5-8 6-7 | 1-4 2-5 3-6 7-8 | 1-4 2-5 3-7 6-8 | 1-4 2-5 3-8 6-7 |
| 1-4 2-6 3-5 7-8 | 1-4 2-6 3-7 5-8 | 1-4 2-6 3-8 5-7 | 1-4 2-7 3-5 6-8 | 1-4 2-7 3-6 5-8 | 1-4 2-7 3-8 5-6 |
| 1-4 2-8 3-5 6-7 | 1-4 2-8 3-6 5-8 | 1-4 2-8 3-7 5-6 | 1-5 2-3 4-6 7-8 | 1-5 2-3 4-7 6-8 | 1-5 2-3 4-8 6-7 |
| 1-5 2-4 3-6 7-8 | 1-5 2-4 3-7 6-8 | 1-5 2-4 3-8 6-7 | 1-5 2-6 3-4 7-8 | 1-5 2-6 3-7 4-8 | 1-5 2-6 3-8 4-7 |
| 1-5 2-7 3-4 6-8 | 1-5 2-7 3-6 4-8 | 1-5 2-7 3-8 4-6 | 1-5 2-8 3-4 4-7 | 1-5 2-8 3-6 4-7 | 1-5 2-8 3-7 4-6 |
| 1-6 2-3 4-5 7-8 | 1-6 2-3 4-7 5-8 | 1-6 2-3 4-8 5-7 | 1-6 2-4 3-5 7-8 | 1-6 2-4 3-7 5-8 | 1-6 2-4 3-8 5-7 |
| 1-6 2-5 3-4 7-8 | 1-6 2-5 3-7 4-8 | 1-6 2-5 3-8 4-7 | 1-6 2-7 3-4 5-8 | 1-6 2-7 3-5 4-8 | 1-6 2-7 3-8 4-5 |
| 1-6 2-8 3-4 5-7 | 1-6 2-8 3-5 4-7 | 1-6 2-8 3-7 4-5 | 1-7 2-3 4-5 6-8 | 1-7 2-3 4-6 5-8 | 1-7 2-3 4-8 5-6 |
| 1-7 2-4 3-5 6-8 | 1-7 2-4 3-6 5-8 | 1-7 2-4 3-8 5-6 | 1-7 2-5 3-4 6-8 | 1-7 2-5 3-6 4-8 | 1-7 2-5 3-8 4-6 |
| 1-7 2-6 3-4 5-8 | 1-7 2-6 3-5 4-8 | 1-7 2-6 3-8 4-5 | 1-7 2-8 3-4 5-6 | 1-7 2-8 3-5 4-6 | 1-7 2-8 3-6 4-5 |
| 1-8 2-3 4-5 6-7 | 1-8 2-3 4-6 5-7 | 1-8 2-3 4-7 5-6 | 1-8 2-4 3-5 6-7 | 1-8 2-4 3-6 5-7 | 1-8 2-4 3-7 5-6 |
| 1-8 2-5 3-4 6-7 | 1-8 2-5 3-6 4-7 | 1-8 2-5 3-7 4-6 | 1-8 2-6 3-4 5-7 | 1-8 2-6 3-5 4-7 | 1-8 2-6 3-7 4-5 |
| 1-8 2-7 3-4 5-6 | 1-8 2-7 3-5 4-6 | 1-8 2-7 3-6 4-5. | | | |

[0215] Large, low-cysteine proteins require extensive secondary, tertiary structure or even quaternary structure, which prevent the formation of alternative folds mediated by alternative disulfide bonding patterns. In microproteins there is little or no secondary or tertiary structure other than the disulfide induced structure and the intercysteine loop sequences (primary structure) are exceptionally variable in amino acid composition. Microproteins are therefore much more likely than other proteins to have enough sequence flexibility to allow them to adopt a variety of different bonding patterns.

[0216] A small number of cysteines are capable of providing a large diversity of completely different topological structures, meaning they cannot be interconverted without breaking the disulfides. These structures are typically obtained with no or minimal sequence requirements in the loops, leaving the loop sequences available for creating binding specificity and affinity for a specific target. A specific protein sequence is likely to show sharp preferences for some folds over others and may not be able to adopt some folds at all. From the sequence motifs of families of natural microproteins it appears that the spacing of the cysteines may contribute to the DBP, with a minor contribution from non-cys loop residues. The average length of inter-cysteine loops in high disulfide density proteins ranges from about 0 to about 10 for the most preferred scaffolds, to about 3 to about 15 amino acids for the majority of scaffolds, which provides a high density of cysteine ranging from about 50% for some scaffolds to 25%-20% (most preferred) to 15%-10% (less preferred) or even 5%, all of which are much higher than the density of Cysteine in average proteins, which is only 0.8%. Where desired, a close proximity of the cysteines is engineered to allow the disulfides to form efficiently and correctly. Efficient bond formation allows many cycles of breaking of the weakest bonds and reformation of new bonds, which gradually leads to the accumulation of the most stably bonded proteins. The low density of cysteines in large proteins appears to contribute to the inefficient and therefore likely incorrect formation of disulfides.

[0217] The different disulfide bonding patterns are expected to differ in their stability to temperature and to proteases. Accordingly, the present invention a non-naturally occurring cysteine (C)-containing scaffold (a) capable of binding to a target molecule, (b) having at least two disulfide bonds formed by pairing intra-scaffold cysteines, and (c) exhibiting the target binding capability after being heated to a temperature higher than about 50° C., preferably higher than about 80° C. or even higher than about 100° C. for a given period of time ranging from 0.01 second to 10 seconds. Where desired, the non-naturally occurring cysteine (C)-containing scaffold may be designed to contain at least three, four, five, six, seven, eight, nine, ten, eleven, twelve or more disulfide bonds, formed by pairing intra-scaffold cysteines.

[0218] Proteins that are more highly crosslinked (e.g., with high complexity number) are expected to be more stable than proteins that can form ‘sub-domains’, containing one or two disulfides but can freely rotate relative to the other part of the protein. Higher stability correlates with the (cumulative) length of the disulfides when drawn on a linear peptide (called ‘complexity’ of the fold) and with the number of times the disulfides intersect each other in a DBP diagram using a linear peptide sequence. However, the different disulfide bonding patterns are expected to form at different yields, with the most crosslinked versions being the least represented. To the extent that cysteine proximity drives disulfide formation, disulfides between adjacent cysteines are the most likely to occur but also the least desired from a stability perspective because they form micro- or sub-domains.

[0219] Accordingly, in some embodiments, the present invention provides protein libraries having non-naturally occurring cysteine (C)-containing proteins, each comprising no more than 35 amino acids, in which at least 10% of the amino acids in the polypeptide are cysteines, and at least two disulfide bonds are formed by pairing intra-scaffold cysteines, and wherein the pairing yields a complexity index greater than 3. In some other embodiments, the present invention provides protein libraries having non-naturally occurring cysteine (C)-containing proteins, each comprising no more than about 60 amino acids, in which at least 10% of the amino acids in the polypeptide are cysteines, at least four disulfide bonds are formed by pairing cysteines contained in the polypeptide, and wherein said pairing yields a complexity index greater than 4, 6, or 10.

[0220] In some aspects, the subject microproteins may exhibit picomolar activity toward a given target, and have high degree of resistance to heating (even boiling) and proteases. In other aspects, the subject micropteins tend to be highly hydrophilic, and tend to have two different binding faces per domain (bi-facial).

[0221] Although each disulfide bonding pattern is in theory compatible with a wide range of different spacings of the cysteines, some cysteine spacing patterns are more compatible with a specific bonding pattern than another cysteine spacing pattern. In natural sequences, there are multiple predominant cysteine spacing patterns associated with each disulfide bonding pattern. For example, the conotoxin, cyclotide and anato families (considered different folds) have very different cysteine spacing but the same disulfide bonding pattern. Thus, it is the spacing of the cysteines that primarily determines the frequency distribution of the disulfide bonding patterns, and design of the CDP is a practical way to control and evolve DBP and structure. The spacing of the cysteines determines the length of the intercysteine loops and to a large extent determines the ‘fold’ of the protein. Proteins belonging to the same family of sequences share the same scaffold sequence or scaffold motif, which is comprised of all of the highly conserved amino acid positions and their predominant spacings, and these are typically considered to have the same ‘fold’.

[0222] The subject microproteins can be monomers, dimers, trimers or higher multimers. Multi-domain microproteins can be homo-multimers or they can be hetero-multimers, in which the domains differ in disulfide number, disulfide bonding pattern, structure, fold, sequence, or scaffold. The subject microproteins can be fused to a variety of different structures including peptides (linear or cyclic) of a variety of different lengths, amino acid compositions and functions. Each domain can have one or more binding surfaces for different targets (i.e., bifacial), similar to or distinguished from many of the natural toxins.

[0223] The present invention also provides non-naturally occurring microproteins having a single protein chain that comprises one or more domains and optionally one or more (cyclic or linear) peptides. Generally each domain folds and functions separately. A microprotein domain has a high disulfide density ‘scaffold’ that largely determines the size of the domain, its stability to temperature and proteases and it's expression level in E. coli (and therefore the cost of goods). The scaffold also is expected to play a significant role in determining the immunogenicity of the protein. The scaffold comprises of 4,6,8,10,12,14,16,18 or more cysteines which form 2,3,4,5,6,7,8 or more disulfide bonds within the same domain.

[0224] Some of the preferred specific 3-disulfide scaffolds that offer improvements in multiple properties are the conotoxins (29aa total, 7aa fixed, no Ca-site, rigid structure due to 1-4 2-5 3-6 disulfide bonding pattern), the cyclotides (24aa total, 10aa fixed, No Ca-site, rigid 1-4 2-5 3-6 structure), the Anato scaffold (37aa total, 10aa fixed, No Ca-site, rigid 1-4 2-5 3-6 disulfide bonding pattern), the Defensin 1 scaffold (29aa total, 10aa fixed, No Ca-site, rigid 1-6 2-4 3-5 bonding pattern), the Toxin 2 scaffold (29aa total, 10 aa fixed, No Ca-site, rigid 1-4 2-6 3-5 disulfide bonded scaffold), but a wide variety of other existing and novel scaffolds also offer specific advantages. Other preferred scaffolds are Cellulose Binding domain (CB, CEB) which is Pfam family PF00734 with 173 members, 26AA long (from first to last Cys) with 4 cysteines linked 1-3 2-4 and a CDP of C10C5C9C; Alpha-conotoxin (AC), which is family PF07365 with 25 members, 15AA long and 4cysteines linked 1-3 2-4 and a CDP of C0C4C8C; Omega-toxin-like (OT) which is family PF00451 with 68 members and 28AA long with 6 cysteines linked 1-4 2-5 3-6 and a CDP of C5C3C10C4C1C; Pacifastin (PC) which is family PF05375 with 39 members and 29AA long and 6 cysteines linked 1-4 2-6 3-5 and a CDP of C9C2C1C8C4C; Serine Protease Inhibitor (SP) which is family PF00299 with 35 members and 26AA long and 6 cysteines linked 1-4 2-5 3-6 and a CDP of C6C5C3C1C6C; Notch (NO) which is family PF00066 with 175 members and 33AA long with 6 cysteines linked 1-5 2-4 3-6 and a CDP of C7C8C3C4C6C; Trefoil (TR) which is family PF00088 with 126 members and 39AA long with 6 cysteines linked 1-5 2-4 3-6 and a CDP of C10C10C4C0C10C; TNF-receptor-like (TN) which is family PF01821 with 123 members and 42AA long with 6 cysteines linked 1-2 3-5 4-6 and a CDP of C14C2C2C11C7C; Anaphylotoxin-like (AT) which is family PF01821 with 123 members and 37AA long with 6 cysteines linked 1-4 2-5 3-6 and a CDP of C5C2C8C2C5C1C; Plexin (PL) which is family PF01437 with 410 members and 61AA long with 8 cysteines linked 1-4 2-8 3-6 4-7 and a CDP of C5C2C8C2C5C12C19C; Other preferred scaffolds are Three Finger Toxin (TF) which is about 58AA long (first to last cys) and has 8 cysteines linked 1-3 2-4 5-6 7-8 and a CDP of C13C6C16C1C10C0C4C; Somatomedin which is 35AA long and has 8 cysteines linked 1-2 3-4 5-6 7-8 (note that alternate DBPs are known) and a CDP of C3C9C1C3C5C0C6C; Potato Protease Inhibitor (PI) which is 47AA long and has 8 cysteines and a CDP of C3C8C11C2C0C5C10C; Chitin Bindin Domian (CHB) which is 37AA long with 8 cysteines linked 1-4 2-5 3-6 7-8 and a CDP of C5C2C8C2C5C12C19C; Spider Toxin (ST) which is 34AA long with 6 cysteines and a CDP of C6C6C0C4C6C; Toxin B (TB) which is 34AA long and has 6 cysteines and a CDP of C6C5C0C3C8C; Cellulose Binding Domain (CEB) which is 26AA long with 4 cysteines linked 1-3 2-4 and a CDP of C10C5C9C; Alpha-Conotoxin (AC) which is 15AA long with 4 cysteines linked 1-3 2-4 and a CDP of C0C4C8C;

[0225] The subject non-naturally occurring microproteins may be designed based natural protein sequences. For example, numerous natural proteins or domains contained therein have attractive features for use as scaffold proteins. Non-limiting examples are listed in Table 2.

TABLE 2

| | Additional examplary members in the |
|---|---|
| Protein Family | family |
| Insulin-like | |
| Toxic hairpin | Heat stable enterotoxin, Neurotoxin B-IV |
| Knottins | Plant lectins, Antimicrobial peptides |
| | (Hevein-like agglutinin (lectin) domain), |
| | Antimicrobial peptide 2, AC-AMP2) |
| Plant inhibitors of proteinases and amylases | Trypsin inhibitor, Carboxypeptidase A |
| | inhibitor, Alpha-amylase inhibitor |
| Cyclotides | Kalata B1, Cycloviolacin O1, Circulin A, |
| | Palicourein |
| Gurmarin-like | |
| Agouti-related protein | |
| Omega-toxin-like | Conotoxin, Spider toxins, Insect toxins, |
| | Albumin 1 |
| Scorpion-toxin-like | Long chain scorpion toxins (Scorpion |
| | toxin, Alpha toxin, Tx10alpha-like toxin, |
| | LQH III alpha-like toxin) |
| | Short chain scorpion toxins, Defensin |
| | MGD-1, Insect defensins, Plant |
| | defensins |
| Cellulose binding domain | Cellobiohydrolase I |
| Growth factor receptor domain | Insulin-like growth factor-binding |
| | protein-5 IGFBP-5, Type 1 insulin-like |
| | growth factor receptor Cys-rich domain, |
| | Receptor protein-tyrosine kinase Erbb-3 |
| | Cys-rich domains, EGF receptor Cys- |
| | rich domains, Protooncoprotein Her2 |
| | extracellular domain |
| Colipase-like | (Pro)colipaseIntestinal toxin 1 |
| EGF/Laminin | EGF-type module (Factor IX, |
| | Coagulation factor VIIa, E-selectin, |
| | Factor X, N-terminal module, Activated |
| | protein C (autoprothrombin IIa), |
| | Prostaglandin H2 Synthase-1, EGF-like |
| | module, P-selectin, Epidermal Growth |
| | Factor (EGF), Transforming Growth |
| | Factor alpha, Epiregulin, EGF-domain, |
| | Betacellulin-2, Heparin-binding |
| | epidermal growth factor HBEGF, |
| | Plasminogen activator (urokinase type), |
| | Heregulin alpha, EGF domain, |
| | Thrombomodulin, Fibrillin-1, Mannose- |
| | binding protein associated serine |
| | protease 2, Complement C1S, |
| | Complement protease C1R, Plasminogen |
| | activator (tissue-type) (tPA), Low |
| | density lipoprotein (LDL) receptor) |
| | Integrin beta EGF-like domains, EGF- |
| | like domain of nidogen-1, Laminin-type |
| | module, Laminin gamma1 chain, |
| | Follistatin module N-terminal domain |
| | FS-N, Domain of BM- |
| | 40/SPARC/Osteonectin, Domain of |
| | Follistatin, Merozoite surface protein 1 |
| | (MSP-1) |
| Bromelain inhibitor VI (cysteine proteinase | |
| inhibitor) | |
| Bowman-Birk inhibitor | |
| Elafin-like | Elafin, elastase specific inhibitor, |
| | Nawaprin |
| Leech antihemostatic protein | Huristasin-like, Hirudin-like |
| Granulin repeat | N-terminal domain of granulin-1, |
| | Oryzain beta chain |
| Satiety factor CART (cocaine and amphetamine | |
| regulated transcript) | |
| DPY module | Dumpy |
| Bubble protein | |
| PMP inhibitors | |
| TSP-1 type 1 repeat | Thrombospondin-1 |
| AmbV | |
| Snake toxin like | Snake venom toxins (Erabutoxin B, |
| | gamma-Cardiotoxin, Faciculin, |
| | Muscarininc toxin, Erabutoxin A, |
| | Neurotoxin I, Cardiotoxin V4II (Toxin |
| | III), Cardiotoxin V, alpha-Cobratoxin, |
| | long Neurotoxin 1, FS2 toxin, |
| | Bungarotoxin, Bucandin, Cardiotoxin |
| | CTXI, Cardiotoxin CTX IIB, |
| | Cardiotoxin II, Cardiotoxin III, |
| | Cardiotoxin IV, Cobrotoxin 2, alpha- |
| | toxins, Neurotoxin II (cobrotoxin B), |
| | Toxin B (long neurotoxin), Candotoxin, |
| | Bucain) |
| | Dendroaspin |
| BPTI-like | |
| Extracellular domain of (human) cell surface | CD59, Type II activin receptor, BMP |
| receptors | receptor Ia ectodomain, TGF-beta type II |
| | receptor extracellular domain |
| Defensin-like | Defensin, Defensin 2, Myotoxin |
| Hairpin loop containing domain-like | APPLE domain |
| Neurotoxin III (ATXIII) | |
| LDL-receptor-like module | |
| Crambin-like | |
| Kringle-like | Kringle modules, Fibronectin type II |
| Kazal-type serine protease inhibitor | |
| Plant proteinase inhibitors | |
| Trefoil/Plexin domain-like | Trefoil, Plexin |
| Necrosis-inducing protein 1, NIP1 | |
| Cystine-knot cytokines | PDGF-like, TGF-beta-like, Noggin, |
| | Neurotrophin, Gonadotropin/Follitropin, |
| | Interleukin 17F, Coagulogen |
| Complement control module, SCR domain | CD46, beta2-glycoprotein, Complement |
| | receptor 1, 2 (cr1, cr2), Complement |
| | C1R and C1S protease domains, MASP-2 |
| Sea anemone toxin k | |
| Blood coagulation inhibitor (disintegrin) | Echistatin, Flavoridin, Kistrin, |
| | Obtustatin, Salmosin, Schistatin |
| Methylamine dehydrogenase, L chain | |
| Serine proterease inhibitors | ATI-like, BSTI-like |
| TB-module/8-cys domain | Fibrillin, TGFb-binding protein-1 |
| TNF receptor-like | TGF-R, NGF-R, BAFF-receptor |
| Heparin-binding domain from vascular endothelial | |
| growth factor | |
| Anti-fungal protein (AGAFP) | |
| Fibronectin type I module | Fibronectin, Tissue plasminogen |
| | activator, t-PA |
| Thyroglobulin type I domain | |
| Type X cellulose binding domain, CBDX | |
| Cellulose docking domain, dockering | |
| Carboxypeptidase inhibitor | |
| Invertebrate chitin binding proteins | |
| Pheromone ER-23 | |
| Mollusk pheromone | |
| Apical membrane antigen | |
| Somatomedin B domain | |
| Notch domain | |
| Mini-cllagen I, C-terminal domain | |
| Hormone receptor domain (HRM) | |
| Resistin | |
| YAP1 redox domain | |
| GLA domain | |
| Cholecystokinin A receptor N-domain | |
| HIV-1 VPU cytoplasmic domain | |
| HIPIP (high potential iron protein) | |
| Ferredoxin thioredoxin reductase (FTR), catalytic | |
| beta chain | |
| C2H2 and C2HC zinc fingers | |
| Zn2/Cys6 DNA-binding domain | |
| Glucocorticoid receptor-like | |
| SBT domain | |
| Retrovirus Zinc-finger-like domains | |
| Rubredoxin-like | |
| Ribosomal protein L36 | |
| Zinc-binding domain of translation initiation factor | |
| 2 beta | |
| B-box Zinc binding domain | |
| RING/U-box | |
| Pyk2-associated protein beta ARF-GAP domain | |
| Metallothionein | |
| Zinc domain conserved in yeast copper regulated | |
| transcription factors | |
| Ada DNA repair domain | |
| Cysteine rich domain | |
| FYVE/PHD zinc finger | |
| Zn-binding domains of ADDBP | |
| Inhibitor of apoptosis (IAP) repeat | |
| CCCH Zinc finger | |
| Zinc finger domain of DNA polymerase alpha | |
| TAZ domain | |
| Cysteine-rich DNA binding domain (DM) | |
| DnaJ/Hsp40 cysteine rich domain | |
| CCHHC domain | |
| SecC motif | |
| TSP type 3 repeat | |

[0226] The design of protease-resistant microproteins is important in terms of minimizing immunogenicity. Many natural microproteins are protease inhibitors. See, Rao, M. B. et al. (1998) Molecular and Biotechnological Aspects of Microbial Proteases. Microbiol Mol Biol Rev. 62(3): 597-635. According to the Nomenclature Committee of the International Union of Biochemistry and Molecular Biology, proteases are classified in subgroup 4 of group 3 (hydrolases). However, proteases do not comply easily with the general system of enzyme nomenclature due to their huge diversity of action and structure. Currently, proteases are classified on the basis of three major criteria: (i) type of reaction catalyzed, (ii) chemical nature of the catalytic site, and (iii) evolutionary relationship with reference to structure.

[0227] Proteases are grossly subdivided into two major groups, i.e., exopeptidases and endopeptidases, depending on their site of action. Exopeptidases cleave the peptide bond proximal to the amino or carboxy termini of the substrate, whereas endopeptidases cleave peptide bonds distant from the termini of the substrate. Based on the functional group present at the active site, proteases are further classified into four prominent groups, i.e., serine proteases, aspartic proteases, cysteine proteases, and metalloproteases. There are a few miscellaneous proteases which do not precisely fit into the standard classification, e.g., ATP-dependent proteases which require ATP for activity. Based on their amino acid sequences, proteases are classified into different families and further subdivided into “clans” to accommodate sets of peptidases that have diverged from a common ancestor. Each family of peptidases has been assigned a code letter denoting the type of catalysis, i.e., S, C, A, M, or U for serine, cysteine, aspartic, metallo-, or unknown type, respectively.

[0228] Exopeptidases: The exopeptidases act only near the ends of polypeptide chains. Based on their site of action at the N or C terminus, they are classified as amino- and carboxypeptidases, respectively.

[0229] Aminopeptidases: Aminopeptidases act at a free N terminus of the polypeptide chain and liberate a single amino acid residue, a dipeptide, or a tripeptide.

[0230] Carboxypeptidases: The carboxypeptidases act at C terminals of the polypeptide chain and liberate a single amino acid or a dipeptide. Carboxypeptidases can be divided into three major groups, serine carboxypeptidases, metallocarboxypeptidases, and cysteine carboxypeptidases, based on the nature of the amino acid residues at the active site of the enzymes.

[0231] Endopeptidases: Endopeptidases are characterized by their preferential action at the peptide bonds in the inner regions of the polypeptide chain away from the N and C termini. The presence of the free amino or carboxyl group has a negative influence on enzyme activity. The endopeptidases are divided into four subgroups based on their catalytic mechanism, (i) serine proteases, (ii) aspartic proteases, (iii) cysteine proteases, and (iv) metalloproteases.

[0232] Human proteases: Cathepsins B, C, H, L, S, V, X/Z/P and 1 are cysteine proteases of the papain family. Cathepsin L and Cathepsin S are known to be involved in antigen processing in antigen presenting cells. Cathepsin C is also known as DPPI (dipeptidyl-peptidase I). Cathepsin A is a serine carboxypeptidase and Cathepsin D and E are aspartic proteases. As lysosomal proteases, cathepsins play an important role in protein degradation. Because of their redistribution or increased levels in human and animal tumors, cathepsins may have a role in invasion and metastasis. Cathepsins are synthesized as inactive proenzymes and processed to become mature and active enzymes. Endogenous protein inhibitors, such as cystatins and some serpins, inhibit active enzymes. Other Cathepsins are Cathepsin G, D, and E.

[0233] Other human proteases one could engineer protein drugs to be resistant against are Tryptase, Chymase, Trypsin, Carboxypeptidase A, Carboxypeptidase B, Adipsin/Factor D, Kallikrein, Human Proteinase 3 (Sigma), Thrombin.

[0234] In addition, naturally-occurring HDD proteins can be used in designing the subject microproteins. Natural HDD proteins include many families of animal cell-surface receptor proteins, as well as defensive (ie ingested) and offensive (injectable) animal toxins, such as the venomous proteins of snakes, spiders, scorpions, snails and anemones. What these protein classes have in common is that they are at the host-environment/pathogen interface. These and any other natural proteins described herein serve as the exemplary scaffolds applicable for generating non-naturally occurring cysteine scaffolds of the present invention.

[0235] Of particular interest are proteins at this interface (in both host and pathogen) that tend to have specialized molecular support systems that allow them to rapidly adapt their sequence. Examples are the pilins in Neisseria and other bacteria, the antibody system in vertebrates, the trypanosome Variable Surface Glycoproteins, the Plasmodium surface proteins (which are in fact microproteins) and many other examples. Rapid adaptation of the AA sequence is clearly observed for microproteins, whose sequences tend to be much less similar than one would expect from the similarity of the genome sequences. The ability to rapidly adapt sequence while retaining a rigid structure (not necessarily the same structure, however) that prevents attack by proteases is likely the reason that this class of proteins has been recruited multiple (seven) times independently in the evolution of animals to serve as the origin of toxins. The repeated recruitment suggests that this class of proteins offers features that are especially useful for building toxins. Other constant features are the small size (these are the smallest folded proteins) and their extreme stability to proteases and temperature.

[0236] Receptor proteins and toxins show rapid rates of sequence variation, causing the toxins of closely related snails to appear completely unrelated. Rapid evolution is thought to be an essential feature of toxins because the venom needs to keep up with changes in a wide variety of receptor proteins (which show increased evolutionary rates for resistance to the toxins) in a wide and changing variety of prey species. One very useful feature of this group is the low degree of immunogenicity imparted by the protease stability of the high disulfide density scaffold, as described in multiple publications. This may be important to avoid creating resistance to toxins in prey that were bitten but got away. Since both the receptor and the toxin need to adapt sequence rapidly, it is not surprising that in some cases both are comprised of HDD microprotein domains. For example, the structure-based class of snake-toxin-like proteins (as defined by the Structural Classification of Proteins (SCOP) database) contains both snake venom toxins as well as the extracellular domains of human cell surface receptors, some of which interact with ligands of the same structure (i.e., TGFbeta-TGFbeta-receptor). Examplary proteins include snake-toxin-like proteins such as snake venom toxins and extracellular domain of human cell surface receptors. Non-limiting examples of snake venom toxins are Erabutoxin B, gamma-Cardiotoxin, Faciculin, Muscarininc toxin, Erabutoxin A, Neurotoxin I, Cardiotoxin V4II (Toxin III), Cardiotoxin V, alpha-Cobratoxin, long Neurotoxin 1, FS2 toxin, Bungarotoxin, Bucandin, Cardiotoxin CTXI, Cardiotoxin CTX IIB, Cardiotoxin II, Cardiotoxin III, Cardiotoxin IV, Cobrotoxin 2, alpha-toxins, Neurotoxin II (cobrotoxin B), Toxin B (long neurotoxin), Candotoxin, Bucain. Non-limting examples of extracellular domain of (human) cell surface receptors include CD59, Type II activin receptor, BMP receptor Ia ectodomain, TGF-beta type II receptor extracellular domain.

[0237] In most natural HDD protein families the disulfide scaffold alone is able to provide a high level of rigidity, which favors high affinity by avoiding an induced fit and the associated entropy penalty. In many microprotein families just 4, 6, 8 or 10 cysteine residues appear to be able to fully determine major properties such as the structure, thermo-resistance and protease resistance of the protein, while leaving all (as in conotoxins) or nearly all of the other residues in the loops free to adopt any sequence that is desired for binding specificity. The cysteines provide a critical function with a minimum of sequence definition (‘low information content’), which statistically favors independent recruitment of this scaffold over alternative scaffolds with more fixed amino acids and a higher information content. For example, 2 extra fixed amino acids increase the information content and reduce the predicted frequency of recruitment from or occurrence in a random pool of sequences by 20×20=400-fold. Similar levels of protein stability based on non-cys amino acids would take many more residues, resulting in a larger and/or evolutionarily less adaptable protein.

[0238] One source of structural diversity of natural toxins is caused by the length variation that HDD (high disulfide density) proteins have been demonstrated to exhibit on an evolutionary timescale. This is described in detail for snake disintegrins (Calvete, J. J., Moreno-Murciano, M. P., Theakston, R. D. G., Kisiel, D. G. and Marcinkiewicz, C. (2003) Snake venom disintegrins: Novel dimeric disintegrins and structural diversification by disulphide bond engineering. Biochem J. 372:725-734. Calvete, J. J., Marcinkiewcz, C., Monleon, D., Esteve, V., Celda, B., Juarez, P. and Sanz, L. (2005) Snake venom disintegrins: Evolution of structure and function. Toxicon 45:1063-1074).

[0239] Deletions (or insertions/additions) of parts of a gene encoding a large HDD protein can give rise to a large number of smaller (or larger) variants that, although homologous to the original sequence, would be regarded as different structures. In the published examples, most of the disulfides are conserved, but a minority of cysteines forms new bonding patterns. The natural mechanisms for this may involve modification at the DNA level, mRNA alternative splicing, degradation, protein (trans-)splicing or other forms of truncation or addition at either end, alternative translation, as well as degradation or other forms of truncation. Whatever the natural mechanism, this principle can be implemented using molecular biology and (phage) display libraries to evolve proteins with optimal potency and stability and minimal size.

[0240] One can also generate novel and modified scaffolds from natural protein sequences including the following preferred families: A-domains, EGF, Ca-EGF, TNF-R, Notch, DSL, Trefoil, PD, TSP1, TSP2, TSP3, Anato, Integrin Beta, Thyroglobulin, Defensin 1 as well as additional families disclosed herein. Existing protein domain families with 2 or more disulfides that function as animal toxins, include the preferred families: Toxin 1, 2, 3, 4, 5, 6, 7, 9, 11, 12, Defensin 1, Defensin 2, Cyclotide, SHKT, Disintegrins, Myotoxins, Gamma-Thioneins, Conotoxin, Mu-Conotoxin, Omega-Atracotoxins, Delta-Atracotoxins as well as additional families listed herein. The modified scaffold may differ from the natural ones in cysteine numbers, disulfide bonding pattern, spacing, size/length from first to last cysteine, loop structure (having different fixed residues or size), ion binding site (with different location, amino acid composition, and ion specificity), performance-related features (including safety, non-immunogenicity, more similar to human, less similar to human, temperature stability, protease stability, hydrophobicity Index, percentage of hydrophilic amino acids, formulation properties like eutectic point, high concentration, absence of specific residues, rigidity, disulfide density, percentage library residues, complexity of the disulfide bonding pattern, and etc.).

[0241] In some cases it is useful to reflect the sub-families that occur in natural diversity, which can be done by including in the same scaffold library multiple length variations of a specific loop design (typically using separate oligonucleotides), each for a different sub-family and reflecting length and sequence differences between sub-families.

[0242] In some applications it may be useful to generate improved variants of existing scaffolds. For example, novel variants of the LDL receptor type A-domains (‘A-domains’) or EGF domains can be generated by a variety of relatively conservative approaches that are likely to result in improved scaffolds compared to the original. There exists a variety of ways to modify the variants, including inverting the cysteine motif (incl. spacing) alone or the motif of conserved residues (incl. non-cys) of the A-domain, by switching the N-terminus to the C-terminus. Inversion has been shown to be feasible with some small peptides and in this case only a small number of amino acids is inverted. Other modifications may involve changing the length of the proteins (shorter or longer) to fall outside the length range of protein domains in the published libraries or in the natural sequences, moving the calcium binding site to a different set of loops, and changing one or more of the fixed non-cys residues in the loops. If the fixed residue is a D, the goal would be to get a non-D residue at this position. A good way to implement this and to test a large number of compositions that are novel for a specific amino acid position is to use a codon that provides a mix of amino acids that is the opposite (ie complementary) of the naturally occurring amino acids or of the mix used in the published libraries. If the published library contains I, L, V in a position, then a novel motif could be obtained by providing all 20 AA except I,L, V in that position. Each position will differ in it's amino acid requirements for structure, and even more so for function.

[0243] Libraries of scaffolds can also be used to find better variants of existing scaffold sequence motifs. One can look for scaffolds that are better than the known scaffold in one or more of the following aspects: different disulfide bonding pattern, and/or different spacing of the disulfides and/or different sequence motifs of the loops, and/or difference in the fixed loop residues and/or different location, absence or AA composition or ion specificity of the calcium binding site.

[0244] Those skilled in the art know how to apply these principles to scaffolds other than A-domains, including the domain families EGF, Ca-EGF, TNF-R, Kunitz, Notch/LNRIDSL, Trefoil/PD/P-type, TSP1, TSP2, TSP3, Anato, Integrin Beta, Thyroglobulin, Toxin 1, 2, 3, 4, 5, 6, 7, 9, 11, 12, Defensin 1, Defensin 2, Cyclotide, SHKT, Disintegrins, Myotoxins, Gamma-Thioneins, Conotoxin, Mu-Conotoxin, Omega-Atracotoxins, Delta-Atracotoxins as well as the additional families listed in table.

[0245] Exemplary modified and novel scaffolds derived from A-domains include protein domain with non-natural sequence (and less than 50aa) which contains the sequence C₁(xx)xxEDsxDxC₂DxxGDC₃xWxx[ps]xC₄(xx)xxxC₅xFxxx(xx)C₆ plus one additional disulfide. There are a number of 4-disulfide domains that are similar to, for example, the 3-disulfide A-domain but are more rigid because they have an extra cysteine in a location that stabilizes the relatively flexible A-domain structure. An example is the 1-8 2-4 3-6 5-7 bonding pattern that comprises the A-domain's 3SS fold (1-3 2-5 4-6), but stabilizes it with 1 disulfide on either side of the A-domain sequence and thereby fixes a key structural weakness. Other high-quality 4-disulfide versions of the A-domain (called ‘A+domains’) are: 1-5 2-4 3-7 6-8, 1-3 2-6 4-8 5-7, 1-4 2-7 3-6 5-8, 1-4 2-7 3-6 5-8, as well as many others. Size should be the similar to the A-domain, just a few AA longer (2-12, preferably less than 8AA). This same analysis and solution can be used for all other 3-disulfide families and also to 2- and 4-disulfide families having the general structures as follows:

[0246] Protein domain (with non-natural sequence and less than 50aa) containing the sequence C₁x(xxx)xFxC₂xxx(xxx)C₃xx(xx)xxxC₄DGxxDCsxDxSDE(xxxx)xC₆ and more than 36 aa between C₁ and C₆.

[0247] Protein domain (with non-natural sequence and less than 50aa) with the sequence C₁x(xxx)xFxC₂xxx(xxx)C₃xx(xx)xxxC₄DGxxDC₅xDxSDE(xxxx)xC₆ and less than 32 aa between C₁ and C₆.

[0248] Protein domain with non-natural sequence and less than 50aa, with three disulfides linked 1-3 2-5 4-6 and more than 36 aa between C1 and C6.

[0249] Protein domain with (non-natural sequence and less than 50aa) with the sequence C₁x(xxx)xFxC₂xxx(xxx)C₃xx(xx)xxxC₄DGxxDC₅xDxSDE(xxxx)xC₆ and less than 32 aa between C₁ and C₆.

[0250] Protein domain with non-natural sequence (and less than 50aa) which contains the sequence C₁(xx)xxxxxxxxC₂xxxxxC₃xxxxxxC₄(xx)xxxC₅xxxxx(xx)C₆ (inverted A-domain)

[0251] Protein domain (with non-natural sequence and less than 50aa) in which one of the underlined amino acids is not present:

C₁x[aps](x)[ekq]FxC₂xxxx(x)C₃[ilv][ps]xx[lw][lrv]C₄DG[dev][pnd]DC₅xD[dgns]SDE(aps)(lps)xxC₆.

[0252] A different presentation of the same approach is (3 different motif levels shown; desired changes underlined):

[0253] C₁x(xx)xxxnonFxC₂xxxx(xx)C₃xxxxxxC₄xxxxnonDC₅x(x)xxxnonDnonE(x)xxxC₆ or

[0254] C₁x(xx)xxxnonFxC₂XXXX(XX)C₃[nonILV][nonPS]xxxxC₄nonDnonGxxnonDC₅x(x)nonDxnonSnonDnonE(x) xxxC₆

[0255] Protein domain with (with non-natural sequence and) the Huwentoxin II fold, a spider toxin that has the same bonding pattern as the A-domain fold but a very different spacing of the cysteines and completely unrelated protein sequence.

[0256] Families of domains not containing duplicated sequences: This class contains mostly animal toxins scaffolds and scaffolds derived from cell-surface-receptors. The protein toxins in the venoms of snakes, spiders, scorpions, snails and anemones can be considered naturally occurring injectable biopharmaceuticals. These venoms typically contain over 100 different toxins, related and unrelated, with a range of receptor- and species-specificities. The majority of these toxins are small proteins with a high density of disulfides. Typical sizes are 15-25aa with 2 disulfides, 25-45 aa with 3 disulfides, 35-50 aa with 4 disulfides as well as many examples with 5,6,7,8 or more disulfides. Examples are delta-Atracotoxin (1-4 2-6 3-7 5-8), Scorpion toxin (1-8 2-5 3-6 4-7), omega-Agatoxin (1-4 2-5 3-4 7-8), Maurotoxin (1-5 2-6 3-4 7-8) and J-Atracotoxin (1-4 2-7 3-4 5-8).

[0257] Phylogenetic analysis has shown that these proteins are an example of convergent evolution, with unrelated animal groups independently generating similar toxin structures from unrelated starting points. Given that the same design principle has won out in at least seven independent occasions (each in an unrelated taxonomic group), this design is expected to have important advantages over other scaffolds that are being used to build other types of toxins (ie microbial protein toxins).

[0258] The only feature that appears to be shared by these proteins is the high density of disulfide bonds. The amino acid sequences of these proteins (other than cys) are highly variable (see conotoxin alignment) and a wide range of different structures (protein folds) has been created.

[0259] One of the desirable properties of these proteins is their exceptionally small size; microproteins are the smallest rigid proteins), which is needed for rapid tissue penetration. A second common feature is their rigidity, which is higher than other proteins of similar size and allows these proteins to avoid induced fit upon binding to a target, which enables higher binding affinities. A third property is the exceptional stability of these proteins, both thermal stability (most microproteins can be boiled without denaturing) as well as resistance to a wide range of proteases. Many of the natural proteins function as protease inhibitors. Stability is important for biopharmaceuticals that are injected intravenously (IV) or sub-cutaneously (SC), and even more important to proteins that are delivered transdermally, nasally, orally, intestinally, or via the blood brain barrier. Stability is also important for long shelflife and convenient shipping and storage. Another property that is of great interest is the non-immunogenicity of these proteins which has been reported to be mediated by their resistance to proteolysis in antigen presenting cells (APC), which was published to be conferred by the high disulfide density structure. Other factors that keep immunogenicity low are the small size of the proteins and their hydrophilicity.

[0260] Families of domains containing duplicated sequences can also be employed in generating the subject microproteins and libraries thereof. Numerous examples are described in the examples below.

[0261] Families of domains containing repetitive sequences: Cysteine-rich Repeat Proteins (CRRPs): The high cysteine content of cysteine-rich repeat proteins allows formation of multiple disulfide bonds either within the repeating unit and/or between two repeating units. This results in a repeating pattern of disulfide bonds. This pattern provides a fixed topology, although in rare cases the same sequence may adopt (or can be evolved to adopt) an alternative disulfide bonding pattern. Disulfide bonds in repeat proteins are characterized by the CRRP motif (X_{A1},X_{A2})/(X_{B1},X_{B2})/(X_{C}) where X_{A} is the cysteine distance between linked cysteines, which is the number of cysteines between the first cysteine to the second cysteine in the same disulfide bond. This cysteine distance can be 1,2,3,4,5,6,7,8,9 or 10. Two (or more) numbers in the CRRP motif indicate two different (or more) types of bonds with X_{A1} describing the first such bond and X_{A2} describing the second disulfide bond. For example, CxCxCxCxCxCxCxC with a 1-4 2-3 topology has a cysteine distance of +3 for the first disulfide bond type and +1 for the second disulfide bond type (‘3,1’).

[0262] X_{B} describes the cysteine distance (number of cysteines) from the first cysteine of one disulfide bond to the first cysteine of the next disulfide bond (e.g. for CxCxCxCxCxC with 1-4 2-3 topology, X_{B} is +1. In the case of two different types of disulfide bonds X_{B1} describes the cysteine distance from the first cysteine of one type of disulfide bond to the first cysteine of the adjacent disulfide bond, while X_{B2} describes the cysteine distance from the first cysteine of the second type of disulfide bond to the first cysteine of the next disulfide bond which in this case is located in the next repeat. In this example X_{B2} is +3 (from C2 to C5), but it can be 1,2,3,4,5,6,7,8,9,10. X_{C} describes the number of disulfide bonds per helix turn in helical repeat proteins, which can be a fraction of 1, or an integer such as 1,2,3,4,5,6,7,8,9,10.

[0263] Each domain typically (but not necessarily) has one end cap on the N- and/or C-terminus. The end caps typically have one or two fewer cysteines than the regular repeats because they only have to connect to one repeat instead of two repeats.

[0264] A more detailed description of repeat proteins would include the ‘span’ (number of non-cys amino acids between two linked cysteines) of each type of disulfide bond in the protein. Another way to describe repeat proteins is to describe the sequence of the repeat unit, for example (CxxxCxCxxxxCxxCCxx)ₙ. The Cₐ and C_{b} notation can be used to indicate which cysteines are linked, such as in (CₐxxxCₐxC_{b}xxxxC_{c}xxC_{b}C_{c}xx)ₙ.

[0265] An important feature of cysteine-rich repeat proteins is that they can be extended on either end, at the N- or the C-terminus. Two approaches for library design are 1) randomization of naturally occurring repeat proteins and 2) synthetic repeats, which are typically obtained by abstraction from natural repeat proteins and may have a somewhat different spacing from the natural repeat sequences (more idealized). Naturally occurring CRRPs include granulins (PF00396), insect antifreeze proteins (PF02420), a furin-like domain (PF00757), the CxCxCx repeat (PF03128), the Paramecium surface antigen (PF01508) and a Drosophila domain of unknown function (PF05444).

[0266] Where desired, the subject cysteine-containing proteins and/or scaffolds can be fused with a bioresponse modifier. Examples of bioresponse modifiers include, but are not limited to, fluorescent proteins such as green fluorescent protein (GFP), cytokines or lymphokines such as interleukin-2 (IL-2), interleukin 4 (IL-4), GM-CSF, and γ-interferon. Another useful fusion sequence is one that facilitates purification. Examples of such sequences are known in the art and include those encoding epitopes such as Myc, HA (derived from influenza virus hemagglutinin), His-6, or FLAG. Other fusion sequences that facilitate purification are derived from proteins such as glutathione S-transferase (GST), maltose-binding protein (MBP), or the Fc portion of immunoglobulin. Library Construction: The present invention provides libraries of the subject cysteine-containing scaffolds. Whereas proteins subject to natural selection need to fold homogenously, a protein with a novel, non-evolved sequence may in principle be able to fold into multiple stable structures, or at least be induced to do so by varying conditions. The folding of different copies of the same protein sequence into different stable structures expands the structural diversity of the library beyond the number of independent clones in the library. The number of independent clones in a library generally equals the number of different sequences and is referred to as ‘library size’, which is about 10¹⁰ for phage display libraries. However the actual number of phage particles used when panning a phage library is typically 10-10,000-fold larger than the library size. The fold excess is called the ‘number of library equivalents’ and there are ways to exploit this difference to obtain greater library performance. If each of the 10-10,000 copies of a clone (ie all having the same amino acid sequence) adopts a different, stable DBP and structure, then the structural diversity can greatly exceed the sequence diversity (10¹¹-10¹⁴). It is possible to further increase structural diversity by using unstable structures that temporarily adopt different structures. However, the diversity can be increased even further if each phage particle displays an unstable protein, which can adopt a wide variety of structures, similar to random peptides and with similar advantages and disadvantages. Proteins that are able to adopt a large number of unstable structures can expand the diversity beyond the number of phage particles (10¹²-10¹⁵). While the recovery of low-affinity clones may require a large number of library equivalents (ie about 100 library equivalents to recover a clone with 1% recovery efficiency), high affinity clone recovery tends to be 100% efficient (as demonstrated by affinity chromatography) and increasing the structural diversity is expected to greatly increase the fraction of high affinity clones. There is a trade-off to increasing the structural diversity with unstable structures since the need to induce a structure in the displayed protein (induced fit of the binding protein, likely not of the target) upon target binding is expected to reduce the binding affinity of these clones.

[0267] One approach is to construct libraries with 4 cysteines (up to 2 disulfides and up to 3 bonding patterns), 6 cysteines (up to 3 disulfides and up to 15 different disulfide bonding patterns), 8 cysteines (up to 4 disulfides and up to 105 bonding patterns) or 10 cysteines (up to 5 disulfides and up to 945 bonding patterns), or 12, 14, 16, 18, 20 or even more cysteines.

[0268] In one aspect, the total number of disulfide bonding pattern can be generalized according to the following formula:

$${\prod }_{i = 1}^{n} 2 i - 1 ,$$

wherein n=the predicted number of disulfide bonds formed by the cysteine residues, and wherein

[0269] Π represents the product of (2i−1), where i is a positive integer ranging from 1 up to n.

[0270] Where desired, a much larger construct encoding a large but variable number (ie 10-30) cysteines can be generated. The resulting cysteine-containing products can fold in a wide diversity of different ways, creating different combinations of structured elements, each containing 2, 3, 4 or 5 disulfides and with potential crosslinking between them. During the directed evolution process of these larger constructs one could break the previously selected constructs up into smaller pieces, for example by random fragmentation, PCR (eg with random primers) or (eg 4 bp) restriction digestion. Once the library diversity of long proteins has been reduced, one can increase diversity again by creating a variety of fragments from each large construct and later on by recombination or other directed evolution methods.

[0271] One potential concern with such libraries of HDD proteins is the presence of unpaired cysteines after most of the disulfides have formed. The free thiols can interact with each other, creating aggregates which tend to score overly high in blocking assays, due to their multivalent binding to the target. However, these free thiols can be blocked, for example, with iodoacetamide or other well-known blocking agents for sulfhydryls to prevent them from forming aggregates or attacking correctly formed disulfides.

[0272] Alignment of the consensus sequences of multiple families of microproteins with the same number of disulfides (ie three disulfides giving 15 possible linkage patterns) shows that the spacing between the cysteines forms an approximately equal distribution ranging from 0 to about 12 amino acids; for simplicity and to keep the average loop length small we prefer families with 0-10 amino acids per intercysteine loop.

[0273] Using synthetic oligonucleotides, one can construct a library such that the DNA encodes the six cysteines and 0-10 NNK (or similar ambiguous codons) residues in the inter-cysteine loops. NNK codons encode all 20 aa but only 1/64 codons will be a stop codon (3 fold less than using NNN codons), which results in a reduced fraction of proteins containing a premature stop codon. Given 5 intercysteine loops, these proteins would contain an average of 25 NNK codons (assuming 0 to 10aa/loop; average 5), leading to a low fraction of clones with a premature stopcodon. The fraction of complete proteins could be increased by using a lower number than 10 or an ambiguous (mixed base composition) codon that excludes stop codons. As shown in the drawing, each oligonucleotide starts and ends with a cysteine codon (sense at one end, antisense on the other end), with 0-10 NNK codons (or the opposite sense) in between the cysteine codons. In this approach to making the synthetic library, all of the loop sequences can be used in any loop location, so all of the cysteines are typically encoded by same codon. All of the oligos are mixed together and a pool of synthetic genes is created by overlap PCR as described previously (Stemmer et al. 1995. Gene).

[0274] A different and powerful approach to creating phage libraries is the Scholle variation of Kunkel mutagenesis (Scholle, M. et al. (2005) Comb. Chem. & HTP Screening 8:545-551) in which the library-encoding oligonucleotide causes a stopcodon in the plasmid to be converted into a non-stop codon. A new version of this involves cycling back and forth between any two stopcodons (typically an amber codon and an ochre codon). This allows application of the Scholle method recursively to an evolving pool of clones without having to reinsert a stopcodon after each cycle of mutagenesis.

[0275] The 3SS (3-disulfide; 15 potential structures) and 4SS (105 potential structures) mixed scaffold libraries are especially useful. The primary control we have over disulfide bonding pattern is the spacing of the cysteines. Which structure (disulfide bonding pattern, ‘DBP’) the protein adopts can be controlled to a certain extent by offering, for example, a range of environments for re-folding. The DBP can be analyzed by trypsin digest and/or MS/MS analysis.

[0276] The problem of structural diversity is similar for both multi-scaffold libraries and for single scaffold libraries, with the difference in magnitude being continuously adjustable. In practice, there is a continuity of library designs based on the spacing of the cysteines, which can be more or less varied (on average between 0 and 15 amino acids per loop) and more or less similar to an existing natural family. The single scaffold libraries typically also contain significant length variation (mimicking the natural variation). Note that the families are created by sequence similarity and that typically for only a few members the structure (bonding pattern) was experimentally determined, so it is possible that a significant number of the natural sequences have a different structure than is assumed from the sequence. It is expected that natural highly evolved, highly fine-tuned (ie high information content) sequences generally fold reliably one way, but that low information content, less highly fine-tuned proteins (such as the ones in early-stage phage display libraries and/or derived from a structurally diverse libraries after one cycle of panning and before directed evolution) would often show several different folds.

[0277] Libraries based on a conserved scaffold of a specific natural family of proteins, like Ig domains or Fibronectin III, typically contain about 5-10% clones that have various problems (ie heterogeneously folded, unfolded, aggregated or poorly expressed). Increasing the length diversity or allowing greater sequence and structural diversity may yield more poorly behaved clones. It is common to screen out the undesired monomers before applying additional cycles of mutagenesis, including making dimers and higher order multimers. However, directed evolution tends to be very effective in making non-optimal clones behave better and one can gradually improve the average quality of the pool of clones by directed evolution, by eliminating clones and/or by sequence alteration and/or by structural alteration). Directed evolution screens for improved activity and since improved folding can be an easy way to improve activity, directed evolution of activity is a proven and efficient approach to obtain increased protein folding efficiency (Leong, S. R., et al. (2003) Proc. Natl. Acad. Sci. USA 100:1163-1168; Crameri, A. et al. (1996) Nature Biotechnology 14:315-319) and increased temperature stability (many published examples). The reason is that clones that adopt the active structure more efficiently appear to be more active and are thus favored in the selection process. The process we aim for is one where the initial rounds of panning will yield many clones that have a variety of folds and while there are likely to have a high level of various problems (incomplete folding, heterogeneous folding, low expression, aggregation, etc), the application of directed evolution (many possible formats including error-prone PCR, homologous recombination, cassette-based recombination, or even simply multiple rounds of screening) in combination with a strong functional selection by (phage) panning is expected to strongly favor clones with homogeneous folding. It is also possible to reduce, refold and repan the same library multiple times (with or without phage amplification) in order to increase the frequency of clones that fold homogenously. Free-thiol affinity columns can be used at each cycle to remove incompletely folded proteins, or the free thiols can be reacted with various capping agents (FITC-maleimide, iodoacetamide, iodoacetic acid, DTNB, etc). It is also possible to refold the whole library or to reduce partially and reoxidize in order to reduce the frequency of free thiols. Phage display and soluble protein binding assays often favor multivalent solutions. Proteins with inter-protein disulfides are a common source of multivalency and need to be removed since they cannot be manufactured. Multiple cycles of phage display (without assaying the soluble proteins intermittently) tends to evolve solutions that only work when on the phage. Screening of soluble proteins is thus generally desired to prevent those clones from taking over. Diversity of protein structures is useful early on, but it is desirable to increasingly remove clones that form inter-protein disulfide bonds. Diversity of structure correlates with indecisive folding and the presence of interprotein disulfides, and structure evolution may be inseparable from inhomogenous folding, so methods need to be developed that tolerate some degree of inhomogeneity.

[0278] In order to evaluate different library designs' for the desired balance of structural diversity and folding homogeneity, one can make small libraries and screen a limited number of clones (30-1000) in order to rapidly evaluate a diversity of library designs.

[0279] Different disulfides in the same protein can react differently, allowing some control. One of the approaches for removing clones with interprotein disulfides from phage libraries may be to subject the phage library to a low level of reducing agents which only reduces the weakest disulfides, such as interprotein disulfides and intraprotein disulfides that are so weak that we prefer to eliminate those clones, and then pass this partially-reduced library over a free-thiol column to remove these clones.

Structural Evolution of HDD Proteins

[0280] As noted above, HDD proteins are amenable to evolution the structure of the protein at every level, including primary (sequence), secondary (alpha-helix, beta-sheet, etc), tertiary (fold, disulfide bonding pattern) and quaternary (association with other proteins). The ability to completely change tertiary structure renders HDD proteins most amenable for rationale design of therapeutics or pharmaceutical compositions. While limited secondary structure evolution (alpha-helix, beta-sheet) may occur with existing directed evolution approaches, creating high-quality modifications in tertiary structure has in practice been difficult with directed as well as rational design.

[0281] Evolution from 2SS to 3SS to 4SS by disulfide addition, and the reverse by deletion, appears to occur frequently and has also been documented for snake disintegrins (Calvete, J. J et al. (2003) Biochem. J. 372:725-734). The relatedness of the DBPs of the natural families is suggestive that re-structuring of the DBP may also occur in nature, which is supported by publications of specific families, such as the Somatomedins.

[0282] The 15 different 3SS structures, 105 4SS or 945 4SS structures are topologically different, meaning they cannot be interconverted without breaking and reforming a disulfide bond. Each 3SS protein has 6 (fully) disulfide-bonded isomers that are ‘nearest neighbor’ variants (2 disulfides with altered bonding pattern, 1 disulfide with retained bonding pattern) and each 4SS protein has 12 isomeric nearest neighbor variants, each with 2 retained disulfides 2 altered disulfides), thus creating a gradual path for structure evolution.

[0283] The process of directed evolution of structure involves initially encouraging a large diversity of structures (not all will be possible and frequencies will differ), followed by gradually tightening the structure as well as partially modifying the structures (ie via gradual DBP alterations) while selecting for better and better binders. The large initial diversity of structures serves to expand the effective library size beyond the number of different AA sequences. However, the more diverse the structures are, the more heterogenous their folding will be, so these proteins generally will require significant evolution for homogenous folding in order to become useful. Structures with optimized loop length will fold more homogenously and will be more protease resistant and less immunogenic. The sequence of the loops, except for an occasional specific position, does not appear to affect tertiary structure and the loops tend to have no secondary structure.

[0284] A preferred approach to optimizing the loop length is to start with relatively long loops (ie 6,7,8 amino acids) and then gradually reduce their length, replacing each loop with a range of other loops of different sizes (with lower average size). This process resembles tightening of a knot. The position of the loops is typically kept constant (ie C2-C3) but their position could be varied, especially if multiple small binding sites in a protein are a useful solution.

[0285] One preferred approach is to replace a loop (ie loop C1-C2, C2-C3, C3-C4, C4-C5, C5-C6, C6-C7 or C7-C8, C8-C9, C9-C10) in a pool of selected clones with a new set of loops of mostly random sequence that have never been selected before. Using different codons for the different cysteines and if necessary a few fixed bases flanking the cysteines, one can create PCR sites to perform the loop exchange in a PCR overlap reaction (preferred), or one could use a restriction site approach.

[0286] Different clones in a pool that are selected to bind to a protein target are likely to bind to different sites on the protein. Even if they use similar sequences to bind to the same site, the clones are likely to differ in their register, some clones having the active sequence in loop 1, other clones in loop 5, for example. It is possible that having more fixed amino acids will result in more clones with the same register, which would be advantageous for directed evolution by homologous recombination.

[0287] There are a large number of ways to perform recombination on the pool of selected clones. In most formats, the loops will be kept intact and permutated relative to each other, but there are also formats in which homology between loops can be used to drive homologous recombination. In general each loop will stay in the same location (ie C4-C5), but even this can be varied. In some formats all of the loops in the pool of selected clones are unlinked and then relinked, but a more conservative approach is to unlink only one specific loop (ie C4-C5) while keeping the other loops linked, creating a library of clones with only 1-2 crossovers instead of many crossovers. The goal is to create many different gradual paths, which requires permutation of many conservative alterations.

[0288] Rather than making a library with many folds or a library with only one fold, we could make a library with limited variability in spacing which is designed to allow a smaller number of structures (ie lower limit of 2, 5, 10, 30, 100, 300 and a higher limit of 10, 30, 100, 300, 1000, 3000) structures that are selected because their bonding patterns result in rigid structures or occur in natural families, providing detailed information for the best cysteine spacing. An example is cxxx(x)cxxcxxxx(xx)cxxxcxxx(x)xxcxxxx(x)cxxxc.

[0289] The effective diversity and quality of a library are both very important but tend to have opposite design requirements. Quality is largely determined by the fraction of clones that fold correctly. Opening up the theoretical diversity (more randomized AA positions) of the library tends to increase the fraction of non-folding clones. Steps to increase folding include the use of native AA in each AA position and conservation of naturally conserved residues. This is easily accomplished for a single-scaffold library, but not for multi-scaffold libraries, which therefore must have a higher fraction of non-folding clones. Randomizing just 2 AA that need to be fixed for folding, the fraction of folded clones is reduced 400-fold, reducing the effective library size.

[0290] It will be useful to create various libraries and measure the fraction of folded clones by measuring the fraction of remaining free thiols using FITC-maleimide (react, wash, measure bound FITC). In addition, it may be useful to remove unfolded clones using solid supports with free-thiols and/or to refold the entire library or the unfolded clones. One approach is to expose the library to e a level of reducing agent that is expected to reduce partially or poorly folded proteins but not reduced stably-folded proteins.

[0291] However, a poor library design will still have a much reduced level of folded clones. One approach is to construct many single scaffold libraries separately and mix the libraries before panning. This should result in a high quality, diverse library.

[0292] Heterogenous folding should be a benefit if it is properly handled. Since routine libraries are 10-e8-10e9 in size and one creates about 10e13 phage particles, each sequence is represented by 10e4-10e5 particles. If panning is performed such that is 100% efficient (ie every 1 nM-or-better clone is captured), then having each sequence present as 10e3 different structures should be a huge benefit to effective diversity and hit-rate and quality. Efficient panning requires high concentration of phage, high concentration of target, increased temperature (faster equilibrium), volume excluders such as 10-15% polyethyleneglycol (PEG), soluble targets versus immobilized targets, etc.

[0293] To facilitate proper folding of proteins, one approach may be to fold (initially) in the presence of a volume excluding agent like PEG, which dramatically increase oligonucleotide hybridization rates and also the efficiency of a shuffling reaction (complex fragment overlap PCR). PEG simply increases the effective concentration of the thiols, leading to more intra- as well as inter-chain disulfides.

[0294] In general, unfolded clones are undesired but heterogenous folding is desired. Unfolding and heterogenous folding clearly go hand-in-hand. Target-induced folding of otherwise unfolded clones is especially useful, but likely a rare occurrence. Because of the expected reduction in effective library size of mixed-scaffold libraries, effective mutagenesis strategies are generally preferred. One may either choose recombination or both length variation and point mutation. Recombination of sequences derived from random libraries can be difficult. Error-prone PCR has an error-rate that is rather low (0.7%) for such short genes and requires recloning. Resynthesis requires sequencing of the selected clones and resynthesis of the library and recloning. Alternatively, one can subject mutator strains of E. coli to many cycles of panning and amplification in order to favor properly folded clones. In addition, one can apply Evogenix' approach.

[0295] The attraction of the 2-3-4 approach is that it adds random sequences at each step by PCR and does not require other forms of mutagenesis. Microproteins can be built from novel or existing peptide ligands or protein fragments. This approach utilizes a short amino acid sequence with or without pre-existing binding properties. The binding amino acid sequence can be flanked on one or both ends by random or fixed amino acid sequences that encode a single cysteine. Oligonucleotides are designed to encode the binding sequence and the flanking cysteine-encoding DNA. The newly introduced cysteines can optionally be flanked with random or non-random sequences. All variations of cysteine-containing flanking sequence are mixed, assembled and converted to double-stranded DNA. These assembled sequences can optionally be flanked with DNA that encodes restriction enzyme recognition sites or annealing to a pre-existing DNA sequence. This approach can generate novel or existing cysteine distance patterns.

Cysteine-Rich Repeat Proteins (CRRP)

[0296] It has been shown that the cysteine-rich repeat antifreeze protein from the beetle Tenebrio molitor can be extended on the C-terminus (C. B. Marshall, et al. (2004) Biochemistry, 43: 11637-46). The extension contains the CRRP motif 1/2/1. The extreme regularity of the helical but beta-sheet-containing (‘beta-helix’) antifreeze protein (FIG. 104) was explored systematically to test the relationship between antifreeze activity and the area of the ice-binding site. Each of the 12-amino acid, disulfide-bonded central coils of the beta-helix contains a Thr-Xaa-Thr ice-binding motif. By adding coils to, and deleting coils from, the seven-coil parent antifreeze protein, a series of constructs with 6-11 coils have been made. Misfolded forms of these antifreezes were removed by ice affinity purification to accurately compare the specific activity of each construct. There was a 10-100-fold gain in anti-freeze activity upon going from six to nine coils, depending on the concentration that was compared.

[0297] Our interest is to make an antifreeze-derived protein with multiple repeats that has been randomized in the least conserved amino acid positions and used to select binders (agonists or antagonists) against selected human therapeutics targets.

[0298] Granulins (FIGS. 102 and 103) are naturally occurring CRRPs with a CRRP motif of 3/2/2 (helix, see FIGS. 130-132). Evidence was presented that individual repeat units possess highly modular nature and are therefore useful for extending the core unit by adding multiple repeats to the C-terminus. (D. Tolkatchev, et al. (2000) Biochemistry, 39: 2878-86; W. F. Vranken, et al. (1999) J Pept Res, 53: 590-7). Upon air oxidation, a peptide corresponding to the 30-residue N-terminal subdomain of carp granulin-1 spontaneously formed the disulfide pairing observed in the native protein. Structural characterization using NMR showed the presence of a defined secondary structure within this peptide. A structure calculation of the peptide indicates that the peptide fragment adopts the same conformation as formed within the native protein. The 30-residue N-terminal peptide of carp granulin-1 is the first example of an independently folded stack of two beta-hairpins reinforced by two interhairpin disulfide bonds.

[0299] Our interest is to make a granulin-derived protein with multiple repeats that has been randomized in the least conserved amino acid positions and used to select binders (agonists or antagonists) against selected human therapeutics targets (FIG. 102).

[0300] Repeat Protein Structure and Affinity maturation: The advantage of CRRPs is that they can be made as long or as short as needed for the specific application, in contrast to most other domains. Thus, they can be given 1,2,3,4,5,6,7,8,9,10 or more binding sites for the same or different targets.

[0301] The advantage of CRRPs over Leucine-rich and other non-cysteine containing repeat proteins is that more amino acids can be randomized in a library, because the folding of CRRPs depends on the presence of disulfide bonds rather than on the presence of a hydrophobic core, which requires many more fixed residues. Libraries of CRRPs thus contain clones with more variable positions (>50, 60, 70 or 80%) which increases the potential surface contact area and the potential for high affinity for the target. Leucine-rich Repeat proteins, such as Ankyrins, are typically varied in only 6AA out of each 33AA repeat, or 24AA per 6-repeat domain, because the endcaps are not randomized.

[0302] Various affinity maturation approaches are shown in FIGS. 140, 14, 142, and 160. These affinity maturation principles are best explained with repeat proteins but are similarly applicable to all other scaffolds described in this application.

[0303] Affinity maturation of CRRPs can be achieved by two different strategies: module addition and module replacement.

[0304] The ‘module addition approach’ starts with a relatively small number of repeat units (e.g. 1-3) and randomized repeat units are added at each step of affinity maturation, followed by selection for binders. At each cycle of evolution one or a few new, randomized modules are added, followed by selection for the most active clones. This process increases the size of the protein at each cycle, while selecting for the desired binding activity after each round of extension. This approach converts randomized sequences into selected sequences.

[0305] The ‘module replacement approach’ starts with a larger number of repeats (e.g. 4-10; the ‘final number’) and at each round of library generation a new group of repeats (typically 1-3) is randomized followed by selection for target binding. In this approach the size of the protein remains constant. Unselected sequences (typically fixed) are gradually converted into randomized sequences which are in turn converted into selected sequences.

[0306] Both approaches yield repeat proteins with a single large binding site or multiple separate binding sites that have been selected for improved binding affinity to 1,2,3,4,5,6 or more targets. The addition of repeats allows the binding site(s) to be extended leading to increased binding affinity compared to a domain that binds it's target at a single site. Repeat protein domains can be linked to other repeat protein domains through short linker sequences that do not contain repeat sequences. This is a similar repeat protein organization as found in natural repeat proteins which often occur in tandem linked by short amino acid sequences and interspersed with non-repeat proteins (H. K. Bins et al. (2005) Nature Biotechnology).

[0307] However, repeat proteins can also be used to form a stiff connection between two binding sites to allow the sites to bind the target simultaneously. In contrast to the flexible peptide linker that is typically present between separate domains, a stiff connector based on repeat proteins is expected to yield a higher binding affinity. Another way to create a stiff connector between binding sites is to use proline-rich sequence, which coils up on itself, or a collagen-like sequence.

[0308] Affinity maturation is carried out by (partial) randomization at the DNA level, targeting either a single continuous sequence or multiple discontinuous sequences. Sequential steps of DNA randomization can also be either discontinuous or continuous (ie sequential) at the DNA level. At the protein level, the mutagenesis may also be discontinuous or continuous, depending on the application. For example, for a helical repeat protein it would be typical to use discontinuous maturation at the DNA and protein chain level to obtain a continuous binding surface on the same side of the protein. It is called discontinuous because the randomized amino acids are discontinuous on the alpha-chain backbone and at the DNA level, even though on the surface of the protein the randomized area is continuous. On the other hand, sequential maturation involves randomization of a set of amino acids that is continuous at the DNA level and protein backbone level, so that all sides of the helix are randomized and can become binding sites for the target, thereby allowing more complex three-dimensional interactions between the repeat protein and the target protein. In the case of discontinuous (DNA-level) affinity maturation, a common fixed sequence in between the randomized sequences can be utilized to perform recombination by restriction enzymes or overlap PCR, either within a library or between multiple libraries, providing an additional step which increases the number of clones that can be screened for improved binding affinity.

[0309] A preferred approach to affinity maturation is sequential randomization, which involves first (partially) randomizing one area of the scaffold protein, selecting a pool of the best clones, then randomizing a second area in the clones of this selected pool, re-selecting a (second) pool of the best clones, and randomizing a third area of the clones in this second pool, and selecting a (third) pool of improved clones. This is shown in e.g., FIG. 136. A preferred approach is to have the three mutagenesis areas (n-term, middle and c-term) be non-overlapping. Any order of mutagenesis can be used, but n-term/middle/c-term and n-term/c-term/middle are preferred choices. It is useful to leave 1 5-20 bp of scaffold sequence unmutagenized between the mutagenesis areas, to serve as an annealing area for oligonucleotides for Kunkel-type mutagenesis. This approach avoids synthetic re-mutagenesis of previously mutagenized sequences, a time-consuming process which typically requires sequencing of the clones, alignment of the sequences, deduction of family motifs and resynthesis of oligos encoding these motifs and creation of new synthetic libraries. A preferred format is to use codon choice such that the randomization yields mostly the amino acids that occur naturally in each position.

Synthetic CRRPs

[0310] Synthetic CRRPs consist of the motif Cₐx₀₋ₙC_{b}x₀₋ₙC_{c}x₀₋ₙC_{d}X₀₋ₙCₑX₀₋ₙC_{f}x₀₋ₙC_{g}x₀₋ₙCᵢx₀₋ₙCᵢx_{0-n n}Cᵢx₀₋ⱼ where C is a cysteine residue at a defined position and x can be any number of amino acids between 0 and 12 between each individual cysteine. These designs are defined by the CRRP motif, e.g. the cysteine distance between individual disulfide bonds and the cysteine distance between the first cysteine of a disulfide bond to the first cysteine of the next disulfide bond. The following motifs are useful for library design: 3/4/1, Cₐx₀₋ₙC_{b}x₀₋ₙC_{c}X₀₋ₙC_{d}X₀₋ₙ CₑX₀₋ₙC_{f}x₀₋ₙC_{g}x₀₋ₙ, where Cₐ forms a disulfide bond with C_{d}; (3,4)/(1,4)/2, Cₐx₀₋ₙC_{b}x₀₋ₙC_{c}X₀₋ₙC_{d}X₀₋ₙCₑX₀₋ₙC_{f}x₀₋ₙC_{g}x₀₋ₙ, where Cₐ forms a disulfide bond with C_{d} and C_{c} forms a disulfide bond with C_{g}; (4/2),(3/1), Cₐx₀₋ₙC_{b}x₀₋ₙC_{c}X₀₋ₙC_{d}X₀₋ₙCₑX₀₋ₙC_{f}x₀₋ₙC_{g}x₀₋ₙ, where Cₐ forms a disulfide bond with Cₑ, (3,5)/(1,2)/2, Cₐx₀₋ₙC_{b}x₀₋ₙC_{c}X₀₋ₙC_{d}X₀₋ₙCₑX₀₋ₙC_{f}x₀₋ₙC_{g}x₀₋ₙ, where Cₐ forms a disulfide bond with C_{f}, C_{b} forms a disulfide bond with Cₑ, C_{d} forms a disulfide bond with Cᵢ; (3,5,7)/(1,2,3)/3, where Cₐ forms a disulfide bond with C_{f}, C_{b} forms a disulfide with Cₑ, C_{c} forms a disulfide with Cⱼ; (4,5)/(1,4)/2, where Cd forms a disulfide with Ci, Cf forms a disulfide with Cj (see FIGS. 125-133).

[0311] Novel CRRP can be designed by starting with a single domain family containing disulfide bonds of a known topology and extending this motif at the N- or C-terminus. In order to achieve disulfide connectivity between the two repeat units, an additional two cysteine residues may need to be introduced by site-directed mutagenesis. The topology 1-4 2-5 3-6 is the most commonly observed disulfide topology among small cysteine-rich microproteins. Domains with this topology can be extended by adding repeats with a related topology. Cysteine residues are introduced at positions between cysteine 1 and cysteine 2, and after cysteine 6. Even in the presence of two additional cysteines there will be a strong tendency to form the 1-4 2-5 3-6 topology as the structural scaffold will only allow this topology.

[0312] Connection Different Structures: See FIGS. 146, 147, 148. Microprotein modules can be linked in a variety of different ways. For example, the C5C5C5C5C5C module with topology 1-4 2-5 3-6 can be linked to another such module without a linker yielding a C5C5C5C5C5CC5C5C5C5C5C module. Modules may be linked with a structured PPPP linker. In addition, cysteine-rich repeat modules can be used to link two modules. Granulin-like repeating units serve as linkers with the general repeating motif (CC5)ₙ. Fusion can also be achieved by a two disulfide containing linker with 13 24 topology and the motif (Cx₀₋ₙCx₀₋ₙCx₀₋ₙC)ₙ, where x is any number of amino acids from 0 to n=12. The antifreeze protein repeat (2C_{A}5C_{B}3)ₙ with a disulfide bond formed between C_{A} and C_{B} is used as a connector between different modules or to connect microproteins to other proteins.

[0313] Design of Typical Synthetic Repeat Protein: The natural design of repeat proteins is a repetition of single building blocks which are added to the core motif. This process can be mimicked during in vitro evolution. Antifreeze protein contains a typical 3-disulfide microprotein as a cap at the N-terminus (CₐxxxxxC_{b}xxC_{c}xxxC_{d}xxCₑxxC_{f}xxxx). A part of this structure can be added to the C-terminus of this sequence using molecular biology. There are two possibilities to chose the repeating unit: either xC_{b}xxC_{c}xxxC_{d}xxCₑx or xxC_{b}xxC_{c}xxxC_{d}xxCₑxxC_{f}x can be added to the C-terminus continuously to design a novel repeat protein. See FIG. 104.

[0314] Design of a synthetic scaffold based on the CXCXCCXCXC motif: Many microprotein families contain a motif consisting of the logo Cxxxxxx(xxxxxxx)Cxxxxxx(xxxxxxx)CCxxxxxx(xxxxxxx)Cxxxxxx(xxxxxxx)C, with a disulfide bond topology 1-4 2-5 3-6. This general consensus is used for library design. Spacings may include additional cysteines and disulfide bonds. Spacing between each disulfide bond averages 13-15. Extra cysteine pairs in addition to the basic motif are indicated in blue or green italics, with linked cysteines sharing the same color.

[chemical structure]

| | 1-4 | 2-5 | 3-6 | Additional SS |
|---|---|---|---|---|
| TOXIN12 | 13 | 12 | 17 | |
| CONOTOXIN | 15 | 15 | 14 | |
| TOXIN 30 | 14 | 13 | 13 | |
| GURMARIN | 14 | 12 | 15 | |
| TOXIN7 | 15 | 13 | 15 | 6-7 |
| CHITIN BDG | 14 | 11 | 13 | 7-8 |
| AGOUTI | 14 | 13 | 16 | 5-10, 7-8 |
| TOXIN9 | 15 | 15 | 15 | |
| AVERAGE | 14 | 13 | 15 | |

The Swissprot database contains 44 members with the spacing 6,5,0,3 and 57 members with the spacing 6,5,0,4 and 34 members with the spacing 6,6,03 and 27 members with the spacing 6,6,0,4. The last spacing (between Cys5 and Cys6) can be varied from 4 to 6 amino acids).

[0315] Cysteine Distance Patterns (CDP): The most commonly used approaches to group natural proteins into families are based on protein sequence homology. The goal of these algorithms is to group protein sequences based on their relatedness, which in most cases reflects evolutionary distance. These algorithms align sequences to maximize the number of matching identical or chemically related amino acids for each position. Frequently, gaps are introduced to improve the alignment. Such homology-based sequence families have been commonly used to identify protein scaffolds that can allow significant sequence variation and thus can serve as base for novel binding proteins. However, homology-based families have limited utility for the design of microprotein-based libraries due to the low degree of sequence conservation between related microproteins. The sequences of closely related microproteins frequently share little sequence homology other than conservation of their cysteine residues. The introduction of gaps by homology-based search algorithms complicates the alignment of microprotein sequences, which is critical to identify residues that can be mutated and residues that are important for protein structure and/or stability. Microproteins differ from most other proteins in their extremely high density of cysteine residues and this group requires an alignment approach that ranks Cysteine spacing as a key parameter, allowing one to group microproteins into clusters that share identical Cysteine Distance Patterns (CDP). Thus a cysteine distance cluster is a group of protein sequences that have several cysteine residues that are separated by identical numbers of amino acids. The sequences of all members of a cysteine distance cluster are aligned because all cluster members have identical total length. In addition, one can easily calculate the average amino acid composition for each position in the sequence. This greatly simplifies the identification of residues that can be varied as well as the degree of variation when constructing microprotein libraries. Large clusters of microproteins with identical CDPs are particularly useful to design microprotein libraries as they provide detailed information about the natural variability in each position.

[0316] CDP clusters are typically subsets of related microprotein sequences. In many cases, all members of a CDP cluster come from the same family of homologous proteins. However, there are CDP clusters that contain members from multiple protein families. An example is the CDP cluster 3_{—}5_{—}4_{—}1_{—}8 (sometimes shown as C3C5C4C1C8 or CxxxCxxxxxCxxxxCxCxxxxxxxxC) that contains 51 members, some from family PF00008 and others from family PF07974. A sequence with that CDP may (in principle) be able to adopt both structures. These structurally diverse CDPs are preferred to obtain structural evolution.

[0317] Since the DBP is difficult to control directly but CDP is easily controlled by gene synthesis, CDP becomes the most preferred way to control DBP and structure.

[0318] Identification of useful CDPs: Useful CDPs can be found by analyzing protein sequence data bases like Swiss-Prot or Translated EMBL (Trembl). A data base that combines information from Swiss-Prot and Pfam and annotates cystine bonding patterns was described by Gupta (Gupta, A., et al. (2004) Protein Sci, 13: 2045-58). Such data bases can be searched for protein sequences that contain a high percentage of cysteine residues, which are typical for microproteins. One can calculate the distance between consecutive or neighboring cysteine residues to get the CDP and then search for CDPs that occur many times. CDPs are of particular interest if many natural sequences share the same CDP, because this suggests that this CDP allows a wide diversity of sequences. Useful CDPs avoid long distances between neighboring cysteine residues (‘long loops’), because these are more likely to be attacked by proteases and more likely to yield peptides that are long enough to bind in the cleft of MHC molecules. Of particular interest are CDPs where none of the distances exceed 15, 14, 13, 12 or 11 amino acids. More preferred are CDPs where none of the distances between neighboring cysteine residues exceed 10, 9 or 8 residues. Of particular interest are CDPs from families that have a low abundance of hydrophobic amino acids like tryptophan, phenylalanine, tyrosine, leucine, valine, methionine, isoleucine. These hydrophobic residues occur with frequencies of ca 34% in typical proteins and are associated with non-specific, hydrophobic binding. CDPs of particular interest contain many members with less than 30, 28, 26, 24 or 22% hydrophobic residues. Preferred CDPs and individual members contain less then 20, 18, 16, 14, 12, or even as low as 8 or 6% hydrophobic residues. Of particular interest are CDPs were individual members show great sequence diversity. Table 2 gives examples of CDPs that can serve as very useful scaffolds for microprotein libraries. [Table 3] gives most preferred CDPs.

TABLE 2
List of exemplary CDPs.

| | | Domain | | | | | | | |
|---|---|---|---|---|---|---|---|---|---|
| | # | Length | Loop length | | | | | | |
| # members | disulfides | C—C; in AA | n1 | n2 | n3 | n4 | n5 | n6 | n7 |
| 124 | 3 | 37 | 6 | 4 | 8 | 1 | 12 | | |
| 107 | 3 | 43 | 3 | 10 | 11 | 9 | 4 | | |
| 103 | 3 | 51 | 8 | 15 | 7 | 12 | 3 | | |
| 93 | 3 | 58 | 12 | 12 | 3 | 13 | 12 | | |
| 92 | 3 | 49 | 7 | 7 | 10 | 2 | 17 | | |
| 90 | 3 | 36 | 6 | 3 | 8 | 1 | 12 | | |
| 77 | 4 | 46 | 1 | 9 | 6 | 1 | 8 | 2 | 11 |
| 74 | 4 | 37 | 8 | 4 | 0 | 5 | 6 | 3 | 3 |
| 70 | 7 | 65 | 1 | 5 | 3 | 0 | 4 | 7 | 4 |
| 69 | 4 | 57 | 10 | 6 | 16 | 3 | 10 | 0 | 4 |
| 65 | 3 | 46 | 15 | 2 | 12 | 3 | 8 | | |
| 60 | 2 | 22 | 4 | 13 | 1 | | | | |
| 59 | 2 | 40 | 3 | 29 | 4 | | | | |
| 54 | 3 | 38 | 6 | 5 | 6 | 5 | 10 | | |
| 54 | 6 | 61 | 1 | 6 | 0 | 4 | 7 | 4 | 0 |
| 49 | 3 | 31 | 6 | 4 | 9 | 6 | 0 | | |
| 49 | 4 | 61 | 1 | 6 | 17 | 2 | 8 | 2 | 17 |
| 47 | 3 | 56 | 11 | 28 | 0 | 3 | 8 | | |
| 45 | 2 | 21 | 4 | 12 | 1 | | | | |
| 45 | 4 | 38 | 8 | 4 | 0 | 5 | 6 | 4 | 3 |
| 44 | 3 | 45 | 3 | 7 | 10 | 6 | 13 | | |
| 44 | 4 | 48 | 1 | 6 | 6 | 2 | 8 | 2 | 15 |
| 42 | 4 | 58 | 13 | 6 | 16 | 1 | 10 | 0 | 4 |
| 41 | 4 | 47 | 3 | 8 | 11 | 2 | 0 | 5 | 10 |
| 40 | 4 | 52 | 3 | 5 | 3 | 9 | 9 | 1 | 14 |
| 40 | 5 | 59 | 8 | 3 | 3 | 6 | 10 | 3 | 1 |
| 39 | 2 | 15 | 1 | 7 | 3 | | | | |
| 39 | 3 | 35 | 5 | 3 | 8 | 1 | 12 | | |
| 38 | 4 | 31 | 1 | 4 | 0 | 5 | 6 | 3 | 4 |
| 37 | 3 | 30 | 12 | 0 | 0 | 10 | 2 | | |
| 36 | 4 | 38 | 8 | 4 | 0 | 5 | 6 | 3 | 4 |
| 36 | 7 | 65 | 1 | 5 | 4 | 0 | 3 | 7 | 4 |
| 35 | 3 | 36 | 0 | 12 | 12 | 6 | 0 | | |
| 34 | 3 | 38 | 9 | 9 | 4 | 0 | 10 | | |
| 33 | 3 | 29 | 12 | 0 | 0 | 9 | 2 | | |
| 31 | 3 | 45 | 2 | 5 | 16 | 2 | 14 | | |
| 31 | 7 | 76 | 2 | 7 | 5 | 0 | 5 | 9 | 9 |
| 30 | 3 | 36 | 7 | 4 | 10 | 1 | 8 | | |
| 29 | 3 | 34 | 6 | 5 | 8 | 1 | 8 | | |
| 29 | 2 | 40 | 13 | 9 | 14 | | | | |
| 29 | 3 | 47 | 16 | 2 | 12 | 3 | 8 | | |
| 28 | 2 | 9 | 0 | 3 | 2 | | | | |
| 28 | 3 | 26 | 6 | 5 | 3 | 1 | 5 | | |
| 28 | 3 | 46 | 3 | 10 | 12 | 11 | 4 | | |
| 27 | 3 | 39 | 9 | 7 | 12 | 3 | 2 | | |
| 26 | 2 | 23 | 5 | 11 | 3 | | | | |
| 26 | 4 | 48 | 1 | 9 | 6 | 1 | 8 | 2 | 13 |
| 25 | 3 | 26 | 8 | 2 | 1 | 8 | 1 | | |
| 25 | 3 | 36 | 6 | 5 | 8 | 1 | 10 | | |
| 24 | 2 | 25 | 3 | 7 | 11 | | | | |
| 24 | 3 | 47 | 3 | 9 | 10 | 6 | 13 | | |
| 23 | 3 | 41 | 12 | 6 | 12 | 3 | 2 | | |
| 23 | 3 | 42 | 10 | 8 | 13 | 3 | 2 | | |
| 23 | 4 | 45 | 1 | 9 | 5 | 1 | 8 | 2 | 11 |
| 23 | 3 | 46 | 3 | 8 | 10 | 6 | 13 | | |
| 23 | 5 | 61 | 2 | 4 | 5 | 6 | 17 | 3 | 10 |
| 22 | 2 | 14 | 3 | 1 | 6 | | | | |
| 22 | 3 | 24 | 0 | 4 | 7 | 1 | 6 | | |
| 22 | 3 | 29 | 4 | 5 | 5 | 1 | 8 | | |
| 22 | 3 | 29 | 5 | 3 | 10 | 4 | 1 | | |
| 22 | 3 | 31 | 12 | 0 | 0 | 9 | 4 | | |
| 22 | 3 | 38 | 0 | 11 | 9 | 5 | 7 | | |
| 22 | 4 | 51 | 1 | 11 | 6 | 1 | 8 | 2 | 14 |
| 22 | 7 | 77 | 2 | 7 | 5 | 0 | 5 | 9 | 9 |
| 21 | 3 | 37 | 7 | 5 | 6 | 5 | 8 | | |
| 21 | 3 | 48 | 6 | 7 | 10 | 2 | 17 | | |
| 20 | 3 | 30 | 13 | 0 | 0 | 9 | 2 | | |
| 20 | 2 | 33 | 9 | 10 | 10 | | | | |
| 20 | 4 | 50 | 1 | 11 | 6 | 2 | 8 | 2 | 12 |

[0319] The column labeled ‘members’ shows the number of natural sequences with the particular CDP that were identified in the data base described by Gupta (Gupta, A., et al. (2004) Protein Sci, 13: 2045-58). ‘n’ is the number of disulfides in the cluster. ‘Domain Length’ is the number of amino acid residues for the CDP (first cys to last cys). The column n1 through n7 list the number of non-cysteine residues that separate the cysteine residues of a cluster. n2=6 means the loop between C2 and C3 is 6AA long, excluding the cysteines.

TABLE 3
List of exemplary CDPs

| | | Domain | | | | | | | |
|---|---|---|---|---|---|---|---|---|---|
| | | Length | Loop Length | | | | | | |
| #members | # disulf. | AA | n1 | n2 | n3 | n4 | n5 | n6 | n7 |
| 575 | 3 | 35 | 6 | 4 | 6 | 5 | 8 | | |
| 518 | 3 | 32 | 4 | 5 | 8 | 1 | 8 | | |
| 190 | 3 | 37 | 6 | 4 | 6 | 5 | 10 | | |
| 155 | 3 | 36 | 6 | 5 | 6 | 5 | 8 | | |
| 93 | 3 | 36 | 6 | 4 | 6 | 5 | 9 | | |
| 72 | 3 | 38 | 7 | 4 | 6 | 5 | 10 | | |
| 71 | 3 | 23 | 2 | 1 | 7 | 1 | 6 | | |
| 67 | 3 | 37 | 6 | 6 | 6 | 5 | 8 | | |
| 64 | 3 | 36 | 5 | 4 | 8 | 1 | 12 | | |
| 62 | 3 | 36 | 7 | 4 | 6 | 5 | 8 | | |
| 59 | 3 | 34 | 4 | 5 | 10 | 1 | 8 | | |
| 57 | 3 | 28 | 3 | 5 | 5 | 1 | 8 | | |
| 57 | 3 | 33 | 4 | 5 | 9 | 1 | 8 | | |
| 56 | 3 | 35 | 6 | 6 | 12 | 3 | 2 | | |
| 54 | 4 | 44 | 1 | 9 | 6 | 1 | 8 | 2 | 9 |
| 51 | 3 | 27 | 3 | 5 | 4 | 1 | 8 | | |
| 49 | 3 | 29 | 1 | 4 | 9 | 9 | 0 | | |
| 45 | 3 | 37 | 6 | 5 | 6 | 5 | 9 | | |
| 43 | 3 | 31 | 4 | 4 | 8 | 1 | 8 | | |
| 43 | 4 | 45 | 10 | 5 | 3 | 9 | 6 | 1 | 3 |
| 38 | 4 | 45 | 1 | 9 | 6 | 1 | 8 | 2 | 10 |
| 34 | 5 | 54 | 8 | 3 | 3 | 8 | 3 | 3 | 1 |
| 33 | 3 | 41 | 3 | 10 | 9 | 9 | 4 | | |
| 29 | 2 | 23 | 6 | 5 | 8 | | | | |
| 27 | 3 | 37 | 6 | 3 | 9 | 1 | 12 | | |
| 26 | 4 | 35 | 3 | 9 | 1 | 3 | 5 | 0 | 6 |
| 25 | 3 | 26 | 4 | 3 | 10 | 2 | 1 | | |
| 25 | 3 | 35 | 4 | 5 | 11 | 1 | 8 | | |
| 24 | 3 | 34 | 5 | 4 | 6 | 5 | 8 | | |
| 24 | 3 | 37 | 7 | 3 | 8 | 1 | 12 | | |
| 24 | 3 | 44 | 3 | 10 | 10 | 11 | 4 | | |
| 23 | 3 | 35 | 6 | 8 | 10 | 3 | 2 | | |
| 22 | 3 | 33 | 5 | 5 | 8 | 1 | 8 | | |
| 22 | 3 | 37 | 3 | 10 | 5 | 9 | 4 | | |
| 21 | 3 | 33 | 9 | 9 | 4 | 0 | 5 | | |
| 21 | 3 | 36 | 3 | 10 | 4 | 9 | 4 | | |
| 20 | 2 | 18 | 9 | 0 | 5 | | | | |
| 20 | 3 | 34 | 5 | 5 | 9 | 1 | 8 | | |
| 20 | 3 | 42 | 3 | 10 | 10 | 9 | 4 | | |
| 20 | 4 | 43 | 1 | 9 | 5 | 1 | 8 | 2 | 9 |

[0320] ‘Members’ gives the number of natural sequences with the particular CDP that were identified in the data base described by Gupta (Gupta, A., et al. (2004) Protein Sci, 13: 2045-58). ‘n’ gives the number of disulfides in the cluster. ‘Domain Length’ gives the number of amino acid residues for the CDP (first cys to last cys). The columns n1 through n7 list the number of non-cysteine residues that separate the cysteine residues of a cluster (‘loop length’).

[0321] Some of the intercysteine loops need to be fixed in size, while other loops can accommodate some length diversity. The length diversity that occurs in the families of natural sequences is one way to estimate what length variation is acceptable for specific loops. Such permitted length variation ranges from minus 10,9,8,7,6,5,4,3,2,1 amino acids to plus 1,2,3,4,5,6,7,8,9 or 10 amino acids.

[0322] Directed Evolution of DBPs and protein folds of pools of clones: The large number of disulfide bonding patterns (DBPs) is an additional degree of freedom that can be used to optimize HDD (‘high disulfide density’) proteins which is not available for non-HDD proteins, even those with many disulfides. One factor is that in larger proteins the disulfides are far apart and unlikely to react unless other fixed sequences fold the protein such that the cysteines are brought together at high local concentration and in the right orientation. Thus, the cysteines have a relatively less important role in folding of larger proteins. Larger proteins with hydrophobic cores tend to have many side-chain contacts that are involved in creating the 3D structure. In this so-called high information content solution, as defined by Hubert Yockey (1974), the DBP is statistically locked in place and evolutionary changes in the DBP are highly unlikely. Structure evolution is likely only available for proteins with a low information content, such proteins that have few residues that are required for structure and function. Information content of a protein, defined as the sensitivity to random mutagenesis, does not simply increase over time as a function of the evolutionary age of the protein. For example, when a gene is duplicated, one of the two copies is free to evolve and effectively has a very low information content even though its information content would be high if there were only one copy of the gene. In a low information content situation, large numbers of amino acids mutations and major changes in structure can occur, which would be lethal if they occurred in a single copy gene. The information content of a protein depends also on the specific functional aspect that is being considered, some functions (ie catalysis) having a much higher information content than others (ie vaccine based on a 9AA T-cell epitope). Redundancy is common in venomous animals, each of which typically has well over 100 different toxins derived from the same or different genes in it's venom. Redundancy likely helps the rapid evolution of HDD proteins, either as multiple copies of the same gene, and/or single copies of different genes encoding a wide diversity of toxins.

[0323] A pool of clones that has been selected for binding to a target may have only part of a domain (a sub- or micro-domain, or one or more loops) providing the binding function. The best clones in a typical 10e10 library would on average have only about 7 amino acids that are fully optimized. This is because the maximum (average) information content that can be added in one cycle of panning is the size of the library (ie 10e10). Multiple cycles of library generation and screening are generally required to accumulate information content beyond that. Three cycles of 10e10 may in theory yield up to 10e30 information content, but typically the number would be much less than due to practical limitations to the additivity. Typically, most of the amino acids in a domain are not directly contacting the target and they could be replaced by a variety of amino acids if not all. One goal of structural evolution is to evolve the DBP of the non-binding parts to result in a modified structure that yields higher affinity target binding, without creating any changes in the amino acid sequence of the parts that bind the target.

[0324] A preferred approach is to encourage the formation of multiple structures from each single sequence, either in the first cycle or after the diversity has been reduced by one or more cycles of panning so that one has a large number of (>10e4) copies of each phage clone, each copy being able to adopt a different DBP and structure. One way to increase the diversity of structures in a library before panning is to suddenly add a high concentration of oxidizing agent to the library after the library has been heated for 10-30 seconds in order to remove any partially folded structures that may have formed. The sudden formation of disulfides, before the protein has had a chance to anneal and explore its folding pathways, should lead to increased diversity, although the average quality of the resulting folds may be reduced by this approach. The opposite approach is used to obtain homogenous folding and typically involves a gradual removal of the reducing agents by dialysis leading to gradual folding and gradual sulfhydryl oxidation. This approach can also involve a gradual decline in temperature, similar to annealing of oligonucleotides. If DBP-diversification is applied to the library in the first round of panning, it is important to create a large library excess, for example 10e5 fold more particles than the number of different clones (typically 10e9-10e10)), to cover the large number of different structures that can be created from each sequence.

[0325] Diversification of DBPs:_The spectrum and distribution of DBPs can be diversified by subjecting aliquots of the same library to a diversity of different conditions. These conditions could include a range of pHs, temperature, oxidizing agents, reducing agents such as DTT (dithiothreitol), BME (betamercaptoethanol), glutathione, polyethyleneglycol (molecular crowding, so infrequent DBP can become more frequent), etc.

[0326] Multi-scaffold libraries: To identify microprotein domains that bind with high affinity to a target, multi-scaffold libraries can be employed according to the following three step process:

[0327] 1. Build sub-libraries based on multiple scaffolds or Cysteine Distance Patterns (CDPs) and various randomization schemes.

[0328] 2. Identify initial hits by panning a number of sub-libraries on the target of interest. This can be done by panning each library separately or by panning a mixture of sub-libraries.

[0329] 3. Initial hits are optimized via affinity maturation, which is an iterative process encompassing mutagenesis and selection or screening.

[0330] The use of multi-scaffold libraries differs significantly from traditional approaches that focus on individual scaffolds. In single scaffold libraries most library members share a similar overall architecture or fold and they differ mainly in their amino acid side chains. Examples of single scaffold libraries were based on fibronectin (Koide, A., et al. (1998) J Mol Biol, 284: 1141-51), lipocalins (Beste, G., et al. (1999) Proc Natl Acad Sci US A, 96: 1898-903), or protein A-domains (Nord, K., et al. (1997) Nat Biotechnol, 15: 772-). Many additional scaffolds have been described in Binz, H. K., et al. (2005) Nat Biotechnol, 23: 1257-68. In some cases, single scaffold libraries contained members that show small differences in the length of individual loops for instance CDRs in antibody libraries. Single-scaffold libraries tend to cover a limited amount of shape space. As a result, one frequently obtains low affinity binders. These molecules don't match the shape of their target particularly well. However, the amino acids that form the contact area have been optimized to partially compensate for the lack of shape complementary. Many publications describe efforts to increase library size (ie ribosome display, combinatorial phage libraries) in order to improve the amino acid diversity in the contact area between the scaffold and the target. Initial hits resulting from single scaffold libraries can be further optimized by affinity maturation. However, this process is typically focused on small changes in external, CDR-like loops in the binding protein and does not affect the overall structure of the domain. There are no examples where affinity maturation of fixed scaffolds leads to major changes in the overall fold and structure of the binding protein; in rare cases where a major change did occur, such clones are generally eliminated because their immunogenicity and manufacturing properties are considered to be unpredictable.

[0331] Multi scaffold libraries contain clones with a diversity of (often unrelated) scaffolds, with large differences in overall architecture. In general, each CDP represents a different shape and each Sub-library contains an ensemble of mutants that sparsely samples the sequence space around a particular CDP. By testing molecules with many different shapes (from many sub-libraries, each with a different CDP), one increases the chance of identifying binding proteins whose structure closely complements the surface of the target. Because each sub-library represents a relatively small sample of the sequence space surrounding a CDP, it is unlikely that one obtains optimum binding sequences from this process. Initial hits from multi-scaffold libraries mimic the shape of their target but the fine structure of the contact surface between the hit and the target may be suboptimal. As a consequence, it is likely that further improvements in binding affinity can be accomplished during subsequent affinity maturation that is focused on optimizing a particular protein's sequence without dramatically changing its architecture. Simplistically stated, the goal is to find the best structure that fits the target, and then find the best sequences that fit this structure and provide optimal complementarity with the target.

[0332] Experimental approaches to finding novel scaffolds: Another way to approach library design is to let the proteins compute the best solutions themselves, by letting a diversity of designs compete. The fully folded and well-expressed proteins are selected and sequenced. The designs with the highest fraction of folded proteins (corrected for the input numbers) are preferred. There are several different approaches to finding the preferred CDP and sequence motif:

[0333] Approach 1: Random CDP, Random Sequence

[0334] The random spacing and sequence approach is not based on the spacings or sequences present in natural diversity and is therefore able to find novel and existing cys-spacing patterns in proportion to their ability to accept random sequence.

[0335] The approach involves making broad, open libraries, like a 10e10 display library with design CX(0-8)CX(0-8)CX0-8)CX(0-8)CX(0-8)C, followed by selection for 25-35AA total length using agarose gels, expression in E. coli, then (optionally) removing all of the unfolded proteins from the display library using a free thiol column, (or screening individual clones for expression level) and sequencing of 200-1000 clones encoding proteins that are well expressed and fully folded.

[0336] All of the distance patterns occur at similar frequencies in the library. We expect to find a strong bias in the spacing/distance patterns that occur in natural proteins but many spacing patterns will be novel. For example, if distance pattern A allows only 0.01% folded proteins and pattern B yields 10% folded proteins, clones with pattern B should occur 1000-fold more frequently than clones with pattern B. Sequencing 1000 clones should be sufficient to identify 10-30 spacings that are the most capable of folding, regardless of the loop sequences. Many spacing patterns found with this approach are likely to be novel and would then be used to make separate libraries based on these spacings. Novel spacings found by this approach would typically be combined with spacings based on natural families in the next approach.

[0337] Approach 2: Natural CDP, Random sequence

[0338] The CDPs for 10-100 specific natural families are synthesized using random AA compositions (ie NNN, NNK, NNS or similar codons), then converted into libraries as a single pool, selected or screened for folding and expression as described above, followed by sequencing of the best folded and expressed clones. This approach results in a ranking of the scaffolds of natural families for their ability to accept random sequence. This approach tends to yield a higher average level of quality because the fraction of folded clones will be much higher than the random CDP approach, but it cannot evaluate as many scaffolds.

[0339] After selecting the preferred spacing patterns, we would determine which non-cys residues are required in a specific spacing pattern to improve folding.

[0340] Approach 3: Natural CDP, Natural AA sequence mixtures

[0341] The spacing patterns for 10-100 specific natural families are synthesized using the natural mix of AA compositions that occur at each position (as determined from alignments), then converted into libraries as a single pool, selected or screened for folding and expression as described above, followed by sequencing of the best folded and expressed clones. This approach tends to yield the highest average level of quality and the fraction of folded clones will be much higher than in the previous approaches, but it is more or less limited to a high density search of the sequence space nature has already explored.

[0342] The highest quality libraries (ie immediately useful for commercial targets) would results from synthesizing the natural families (natural CDP) with all of the fixed non-cys residues, but with some variation in each position. The sequence analysis of the well-folded clones will then tell us which of the fixed residues are truly required and in which residues variation is allowed.

[0343] Structure Evolution: The folding of disulfide containing proteins into a well-defined 3-D structure largely depends on the nature of the reducing environment present, both in vivo and in vitro. For example, reduction of disulfide bonds can lead to a complete loss of protein structure, underlining the importance of disulfide bonds for the maintenance of structure. On the opposite end, during the folding of a fully reduced and unfolded protein, a multitude of theoretical disulfide isomers are possible due to the oxidation of cysteines that come in close contact during folding. There are three theoretical disulfide isomers for a protein containing four cysteines, 15 isomers with six cysteines, 105 isomers with eight cysteines etc. Such diverse and often non-productive isomers are also observed during the protein folding process, but only one combination of cysteine pairings is usually represented in the native conformation. This is why disulfide isomerization is regarded as a major problem by most researchers during in vitro refolding studies. However, disulfide isomerization can be utilized for the evolution of structural diversity of disulfide-rich microproteins. Due to their small size and high-disulfide content these proteins often rely solely on the covalent linkages of cysteines to maintain a folded conformation. Many microproteins completely lack a hydrophobic core, which is regarded as a common underlying force for the folding of large proteins. Distinct disulfide isomers have been experimentally observed in a single member of the microprotein families Somatomedin B and snake conotoxins (Y. Kamikubo, et al. (2004) Biochemistry, 43: 6519-34; J. L. Dutton, et al. (2002) J Biol Chem, 277: 48849-57). However, these publications describe the presence of multiple isomers as a problem to be fixed, not as an opportunity to exploit for protein design. Generally applicable concepts and experimental procedures can therefore be developed to use disulfide isomerization as a driving force for structural evolution of microproteins.

[0344] Structural evolution by disulfide shuffling: See FIGS. 152, 153, 154. The following section provides a specific experimental approach to utilize disulfide isomers for structural evolution. After secretion of phage particles fused to a particular microprotein, these particles are subjected to highly reducing conditions by incubating the mixture at millimolar concentrations of reduced glutathione, a redox active and disulfide-containing tripeptide. Phage particles are then purified from reducing agent in a buffer containing millimolar concentrations of EDTA to prevent air oxidation of free thiols. This library will contain a large number of reduced and structurally diverse polypeptide chains. After contacting these reduced mixtures of isomers, the library is then subjected to oxidizing conditions, e.g. millimolar concentrations of oxidized glutathione, during target binding, to lock in favorable microprotein conformations by oxidation of their thiols. This approach selects for microprotein binders that initially interact with their targets in their reduced state and are then locked in the binding conformation by rapid oxidation. The pool of selected microproteins is shape-complementary to the target protein, and this process is called disulfide-dependent target-induced folding. The best binders are selected and subjected to additional cycles of directed evolution (mutagenesis and panning) until reaching an active and fully oxidized conformation in a target-independent manner, such that the target is no longer needed to induce the desired conformation, resulting in a protein that is easier to manufacture.

[0345] Alternatively, the phage library is subjected to a buffer of intermediate redox potential to allow disulfide shuffling. This can be easily achieved by choosing a buffer composition with varying ratios of oxidized and reduced glutathione. This will allow only partial oxidation of a subset of cysteine residues and subsequent disulfide shuffling, e.g. breaking and reformation of existing bonds favoring the accumulation of the most disulfide bonds. Therefore a pool of many different structural combinations (dependent on the number of cysteine residues of a given microprotein) is present under such conditions. The most potent clones will then be selected and subjected to another round of disulfide shuffling (with or without amino acid sequence optimization).

[0346] Covalent target binding through disulfide bonds:_Contrary to a long-held view, recent work has shown that the specific reduction of disulfide bonds can occur in the extracellular environment (P. J. Hogg (2003) Trends Biochem Sci, 28: 210-4). Endothelial cells were shown to secrete a reducing activity into their supernatants, which could be identified as thrombospondin-1, a glycoprotein with a redox active thiol in its calcium-binding domain (J. E. Pimanda, et al. (2002) Blood, 100: 2832-8). Remarkably, the free thiol of thrombospondin-1 controls the length of the adhesion protein von Willebrand factor by reducing intermolecular disulfide bonds. These observations can be utilized to covalently link novel microproteins to disulfide-containing target proteins. The approach would be to select for partially reduced and redox active microproteins which bind in the vicinity of disulfide bonds in target proteins. For example, after binding to a target protein, a phage display library of microprotein variants would be selected to resist washing under oxidizing conditions but to be specifically eluted upon washing under reducing conditions. Thus, during protein evolution, some disulfide bonds will be formed that stabilize microprotein structures, while others will be selected against to select for redox active free thiols.

[0347] The evolution of structural diversity refers to changes in structure experienced by a specific clone. The structure change is typically dependent on sequence change but even two identical sequences can adopt different structures. The structure differences can be at the level of disulfide bonding pattern or fold, which is generally due to structurally significant changes in loop length. Structure evolution differs from structural diversity (such as used by many multi-scaffold libraries) where multiple scaffold structures are used but each clone always adopts the structure of it's parental sequence: In structural evolution each clone can have a different structure from it's parental sequence.

[0348] FIG. 155 shows the dominant 3SS bonding pattern (18 different natural families) and the disulfide variants that can be created from it in one step. Most of the naturally occurring families are within 1 step of the dominant pattern (14 25 36). FIG. 155 also shows the 4SS variants that can be created by adding 1 disulfide to the dominant 3SS pattern (14 25 36), without changing any of the existing disulfides. 11/15 of the naturally occurring 4SS bonding patterns can be obtained by adding 1 disulfide to the dominant 3SS pattern without breaking any of the 3SS disulfide bonds. Since there are 105 total, the data suggest a strong preference for addition of a disulfide to a pre-existing 3SS protein. I think this analysis should be able to answer if the preferred path is the reverse, which is the deletion of a disulfide from a 4SS protein to create a 3SS protein). Unless the incompleteness of the database has affected these results (possible), it appears that the 14 25 36 and its 4SS derivatives obtained by addition of 1 disulfide are preferred starting points.

[0349] Microprotein build-up approaches: The goal of the build-up approach is to obtain stepwise affinity maturation of the binding protein for the target. At each cycle a library is created which adds a pair of cysteines plus a randomized sequence (typically a new loop) to the product from the previous selection cycle, followed by library panning to select the clones with the highest affinity for or activity on the target. The starting point can be a single sequence or a pool of sequences, and the sequence of the randomized area of the starting point can be known or unknown.

[0350] Creating 1-disulfide (‘1SS’) proteins as starting points: Novel microproteins with 2 or more disulfides can be created from single disulfide-containing proteins using a build-up approach. One build-up approach begins with a protein that contains two fixed cysteine residues (for a 1-disulfide or ‘1SS’ protein). Optionally, this protein can have the same intercysteine spacing or length (called ‘span’, which excludes the cysteines) as found in one loop of a preferred (typically natural) disulfide bonding pattern. Such similarity makes it easy to graft the 1SS peptide into a pre-existing 2SS, 3SS, 4SS or higher order scaffold. The spans for 1SS libraries are typically from 0 to 20 amino acids in length, preferably 5,6,7,8,9,10,11,12,13,14,15 and more preferably 7,8,9,10,11,12 and ideally 9,10,11 amino acids long. There can be additional randomization of residues outside of the pair of cysteines (ie outside of the loop or ‘span’). The initial 1SS protein is typically fully or partially randomized between the cysteines but sometimes it contains fixed amino acids (other than the cysteines) that provide folding or affinity to target molecule(s).

[0351] Build-up from 1SS to 2SS or higher scaffolds: One way to mature a previously selected 1SS protein is to provide two new cys residues in fixed positions, or in a variety of preferred positions as a library. Typically the residues flanking these two new cysteines as well as the new loop would be randomized.

[0352] Proteins with an uneven number of cysteines tend to be toxic and/or poorly expressed and are efficiently removed by the expression host. Thus, even if one encodes a random number of cysteines, only DNA sequence encoding an even number of cysteines are expressed as functional phage particles. Thus, one way to expand a previously selected (pool of) 1SS peptide(s) into a (pool of) 2SS peptide(s) is to create a library with a single third fixed cysteine as well as a larger (and variable) number of randomized residues, some of which are statistically expected to encode a Cys residue. A known fraction of these randomized positions will encode for cysteine residues, and, following the removal of sequences with an uneven number of cysteines by phage growth, 2SS proteins with a second pair of cysteines will constitute >50%, preferably >60-80% or sometimes even >90-95% of the phage library. The new cysteine(s) and/or the newly randomized area can either or both be on the N-terminal side of the starting protein, or either or both on the C-terminal side of the protein, or, less typically, inside the starting protein sequence. It is possible for the disulfide bonding pattern to change during the build-up process. The original disulfide bond(s) may be replaced by disulfide bonds linking different cysteines (new DBP).

[0353] Extension approach: Proteins (of any length or disulfide number) that bind to the target can be extended by fusing them to a randomized library sequence, which typically comprises one (or more) pair(s) of cysteines separated by a number of random positions and optionally with variable spacing. Libraries of such proteins are selected for enhanced binding affinity to a target molecule. This approach is likely to result in a second binding site of different sequence that folds separately from the first binding site.

[0354] Dimerization approach: Especially for targets that are homo-multimers or located on the cell surface, it is attractive to duplicate a previously selected binding site, creating a dimer, trimer, tetramer, pentamer or hexamer of identical disulfide-containing sequences, each able to bind to the same site on the target. If the target can be bound simultaneously at multiple sites, then the avidity of the binding increases. Optimal avidity typically requires that the spacing between binding sites is optimized by testing a variation of spacers of different length and optionally different composition. An example of a homo-dimeric microprotein that binds to human VEGF is described herein. A spacer composed of Gly-Ser is used between the binding sites and the length can be adjusted to provide optimal avidity for the dimeric VEGF target.

[0355] Series of existing CDPs: It is possible to add disulfides in such a way that the spacing (‘Cysteine Distance Pattern’, CDP) of each 1SS, 2SS or 3SS construct is the same as the CDP of an existing family of proteins, such that, for example, each stage of the buildup uses a natural CDP. It is also possible to graft the selected 1SS or 2SS protein into an existing 3SS, 4SS or 5SS scaffold in a place with similar loop length. Disulfides can be added with the goal of changing the existing disulfide bonding pattern, creating a library of structural variants or DBP variants, or maintaining the existing bonding pattern. Control over the DBP depends largely on whether the new cysteine pair and the new randomized sequence are added only on one end of the starting protein (tending to conserve the existing DBP) or whether they are added on both sides of the existing protein (ie one cysteine on each side), which tends to lead to changes in DBP. If one wants to conserve existing disulfide bond(s), then it helps to leave some extra spacer residues between the old cysteine pairs and the newly added cysteine pair(s). Such as spacer can have any sequence, but a glycine rich spacer is preferred (ie multimers of GGS or GGGGS). If the target molecule is dimeric (soluble) or cell-bound, then a spacer that is long enough to allow both microprotein motifs to bind to their target result in simultaneous binding at both sites, resulting in increased avidity or apparent affinity.

[0356] Build up by Megaprimer method: The Megaprimer methods allows the creation of new libraries from old libraries, avoiding the complexities arising from the presence of a library of sequences. A PCR fragment is generated containing the pool of previously selected 1SS proteins and this fragment is overlapped with a new DNA fragment (oligo or PCR product) encoding a new library with one or two new Cys residues. A ssDNA runoff PCR product (‘Megaprimer’) created from this overlap fragment, containing ends that are homologous to the vector, is annealed to the vector and used to drive a Kunkel-like polymerase extension reaction, using a template containing a stop-codon in the area to be replaced by the Megaprimer. Alternatively, a pair of unique restriction sites can be used to create a new library within a library of previously selected vectors. The genetic fusion to phage protein pIII or pVIII allows presentation of the protein on the phage capsid. Proteins with an even number of cysteines can be selected by: i) phage growth, ii) affinity selection, iii) free thiol purification, and/or iv) screening of DNA sequences. One or multiple cycles of this approach can be used to build the disulfide content up from 1 SS, 2SS, 3SS, 4SS, 5SS, 6SS or a higher number of disulfides. Any disulfide number can be used as the starting point.

[0357] A number of specific exemplary build-up process are described below.

[0358] The 234 Design Process: See FIG. 138. One preferred approach is called ‘234’, because it involves first creating and panning a 2-disulfide library containing a mixture of all three bonding patterns, then selecting a pool of the best clones, which is used to create a new library with additional (partially) randomized amino acid positions and one additional pair of cysteines, thus forming a three-disulfide library which can adopt up to 15 different structures, some of which would have the original four cysteines forming a different bonding pattern, thus enabling structural evolution of the original 2SS sequence. Each ‘library extension segment’ typically encodes several codons encoding a mixture of amino acids (ie encoded by an NNK, NNS, or similar mixed codon) plus one or more cysteines (located on the outside) and can be added at the 5′ or N-terminal end of the previously selected pool of sequences, or on the 3′ or C-terminal side of the previously selected pool of sequences, or at both ends. In order to avoid free thiols, it is desirable that an even number of cysteines (2,4,6) is added to each clone. This can be done by adding library extension segments to both ends (1 cysteine and 4-5 randomized codons on each end), or as one segment encoding two (or 4 or 6) cysteines and 6-8 ambiguous codons (encoding a desired mixture of amino acids) that is added to only the C-terminal end or only to the N-terminal end. This process can be repeated multiple times.

[0359] The 234 directed evolution process thus comprises of the following steps: initial library construction (2SS), target panning, (optional: screening of individual clones and pooling of the best), extension library construction (3SS), target panning, (optional: screening of individual clones and pooling of the best), extension library construction (4SS), target panning, and final screening of individual clones to identify the best 4SS binder.

[0360] Many variations of this process can be devised. It is possible to use 4,5,6,7 or more disulfides, or, for example, to make two-disulfide jumps instead of 1-disulfide jumps, or to pan one library against one target and the following library against a second target, in which the targets can be related or unrelated.

[0361] A preferred approach is to make a 2SS library with a CDP that is also found in (and preferably common) in natural 3SS protein, and to make a 3SS library with a CDP that is also found in natural 4SS proteins; this way one can be reasonably certain that the 2SS proteins can be matured into 3SS and that the 3SS proteins can be matured into 4SS proteins.

[0362] The 3x0-8 and 4x0-8 Design Processes: See FIG. 139. The ‘3x0-8’ and ‘4x0-8’ preferred design processes aim to create all of the 15 3-disulfide structures or all of the 105 4-disulfide structures in order to present maximal structure diversity and sequence diversity to the panning targets. The same approach can be extended to the 5-, 6-, or even 7-disulfide microproteins (5x0-8, 6x0-8, 7x0-8).

[0363] Analysis of the loop lengths of all of the natural 3-disulfide microproteins shows that the loops tend to range in size from 0-10 amino acids. The averages for the five loops (C1-C2, C2-C3, C3-C4 and C5-C6) are very similar (ranging from 0-8 to 3-12 after some of the longest loops are eliminated because they are undesirable), although between different scaffold families there are sharp differences in the size of the loops. For example, loop C1-C2 in conotoxins is 6AA long versus 0AA in anato domains, even though both have the same disulfide bonding pattern.

[0364] The sequence motif C1 x₀₋₈ C2 x₃₋₁₀ C3 x₀₋₁₀ C4 x₀₋₈ C5 x₀₋₉ C6 is predicted to cover over 90% of the natural 3SS protein sequences and the vast majority of all unknown 3SS microproteins with useful properties. The library construction process is easier with loops with equal length, such as 0-8, resulting in a library sequence motif of C1 x₀₋₈ C2 x₀₋₈ C3 x₀₋₈ C4 x₀₋₈ C5 x₀₋₈ C6, or the 4SS version of this design which is C1 x₀₋₈ C2 x₀₋₈ C3 x₀₋₈ C4 x₀₋₈ C5 x₀₋₈ C6 x₀₋₈ C7 x₀₋₈ C8. Other loop lengths that can be used are 0-10, 0-9, 0-8, 0-7, 0-6, 0-5, 0-4, 1-5, 1-6, 1-7, 1-8, 1-9, or 1-10 although most loop lengths are expected to work.

[0365] This type of library is expected to contain a large number of sequences that fold heterogeneously, meaning they are able to adopt multiple different structures and cannot be produced in homogenous form easily. This heterogeneity is a disadvantage for protein production but the increased diversity is an advantage for panning and early ligand discovery.

[0366] In traditional display libraries of synthetic protein diversity, all of the clones share the same fixed protein scaffold. While a huge diversity of sequences is created, they all share the same structure and no significant structural diversity is present. In contrast, the 3x0-8 and 4x0-8 libraries contain an approximately equal mixture of 15 or even 105 very different structures.

[0367] A typical phage display library contains 10e9 to 10e10 different clones, typically each having a different sequence. However, what is panned is a pool of about 10e13 phage particles containing on average about 1000-10,000 copies of each sequence or clone. This number of copies is called the ‘number of library equivalents’. Each of the 1000-10,000 copies of the same sequence can adopt a different structure, due to the folding heterogeneity that is mediated by disulfide bond formation. The effective library size of 3x0-8, 4x0-8 or 5x0-8 libraries is thus 10, 100, or 1000 fold greater than single scaffold libraries. A library of this design is thus expected to contain all or most of the theoretically possible structures, disulfide bonding patterns and folds.

[0368] It is possible to narrow the range of length range of the loops in order to keep the average protein small, prevent undesired structures from forming and to increase the frequency of desired structures. Intermediate loop lengths can be used, such as 2-6, 2-7, 2-8, 2-9, or 2-10 amino acids, or 3-4, 3-5, 3-6, 3-7, 3-8, 3-9 or 3-10 amino acids, or 4-5, 4-6, 4-7, 4-8, 4-9 or 4-10 amino acids, or 5-6, 5-7, 5-8, 5-9 or 5-10 amino acids.

[0369] It is also possible to pick a single fixed loop length for the library, typically 1,2,3,4,5,6,7,8,9 or 10 amino acids long.

[0370] A complementary approach to keep the average protein size small is to use DNA fragment sizing gels to select DNA fragments encoding an upper limit of 20,21,22,23,24,25,26,27,28,29,30,31,32,33,34,35,36,37,38,39,40,41,42,43,44,45,50,55,60 amino acids and a lower limit of 13,14,15,16,17,18,19,20,21,22,23,24,25,26,27,28,29,30,31,32,33,34, or 35 amino acids.

[0371] The 4×6 Design Process: See FIG. 140. A preferred approach is the ‘3×6’ or ‘4×6’ process, which starts with a library that has 3 or 4 disulfides and a fixed loop size of 6 amino acids that can have variable sequence. The protein sequence motif for the 4×6 library is C1 x₆C2x₆C3x₆C4x₆C5x₆C6x₆C7x₆C8 (subscript means the number of amino acid positions which can contain a mixture of bases (often encoded by NNK, NNS or a similar ambiguous codon; numbers after the C refer to the order of the cysteines in the protein from N- to C-terminus). In natural families of microproteins, cysteines that are bonded together are separated on the protein chain backbone by an average of 10-14 amino acids (average 12); we call this distance the ‘disulfide span’. The span is rarely less than about 8-9 amino acids. When neighboring cysteines disulfide bond, they form a sub-domain which is undesirable for most applications because it has its own thermal and protease instability profile. These undesirable subdomains can be eliminated by choosing a loop length that is too short to allow neighboring cysteines to bond, ie less than 9 amino acids. A fixed spacing of 6 AA appears to be especially favorable, because it prevents sub-domains and creates multiple places where (non-neighboring) cysteines are spaced 12 amino acids apart, which appears to be ideal since it is the average in natural proteins. Eliminating the subdomains removes the 69 worst 4SS disulfide bonding pattern and can only give the 36 best 4SS disulfide bonding patterns. Fixed spacings of 4,5,7 or 8 amino acids or combinations thereof are also feasible.

[0372] The vast majority of the known natural 3SS toxins would be contained in a single ‘all-scaffold’ library with the following composition: C1-(x₀₋₁₀)-C2-(x₂₋₁₂)—C3-(x₀₋₁₀)-C4-(x₀₋₁₀)-C5-(x₀₋₁₂)—C6. Such a library would additionally contain the vast majority of unknown natural toxins and an even larger number of non-naturally occurring toxins. The average length of proteins encoded by such a library would be: 1+5+1+7+1+5+1+5+1+5+1=33 amino acids.

[0373] To create shorter proteins, it would be possible to use a higher molar ratio of the oligos encoding the short sequences to those encoding the long sequences, or to limit the maximum loop length to only 8 aa rather than 10-12 aa.

[0374] Similarly, an all-scaffold library with the following composition would comprise the vast majority of 4-disulfide HDD toxins, with 105 different disulfide bonding patterns and over a thousand potential folds:

C1-(x₀₋₁₀)-C2-(x₀₋₁₀)-C3-(x₀₋₁₀)-C4-(x₀₋₁₀)-C5-(x₀₋₁₀)-C6-(x₀₋₁₀)-C7-(x₀₋₁₀)-C8

[0375] And a 5-disulfide ‘all-scaffold’ library would be specified by

[0376] C1-(x₀₋₁₀)-C2-(x₀₋₁₀)-C3-(x₀₋₁₀)-C4-(x₀₋₁₀)-C5-(x₀₋₁₀)-C6-(x₀₋₁₀)-C7-(x₀₋₁₀)-C8-(x₀₋₁₀)-C9-(x₀₋₁₀)-C10.

[0377] The x typically refers to a desirable mixture of amino acids. Although one can use NNN codons to encode the mixture of amino acids, other codons have advantages. Each codon offers a different mixture of amino acids.

[0378] For example, NNK decreases the frequency of stop codons 3-fold. Different codons are useful for different applications. A mix favoring hydrophilic amino acids is desirable, avoidance of stop codons, tryptophans, other hydrophobic amino acids and avoidance of cysteines in the loops is also desirable. Molecular biologists know how to select the codons that yield the mixture that is desired. The codons that would typically be used to select contain A,C,G,T or the mixed-base letter N,M,K,S,W,Y,R,B,D,V or H as the first base in the codon, and contain A,C,G,T or the mixed-base letter N,M,K,S,W,Y,R,B,D,V or H as the second base in the codon, and contain A,C,G,T or the mixed-base letter N,M,K,S,W,Y,R,B,D,V or H as the third base in the codon, resulting in a large number of possible codons each encoding a different mixture of amino acids.

[0379] The loop sequences of natural HDD proteins contain a small number of fixed residues that are likely to play a role in protein folding. The previous approach simply uses random codons and lets the diversity supply these residues if they truly are important for folding. This random codon approach will result in lower library quality compared to libraries that use the natural composition of amino acids for each position, but may be the best at exploring the potential for novel folds.

[0380] However, if, for example, a W is required for folding or function but an NNK codon is used in that position, only 1/64 clones in the library meet this requirement, so the effective size of the library is reduced 64-fold, which may be sufficient to prevent obtaining useful binders. It is therefore likely to be important that any residues that appear to be fixed in natural sequences are also fixed in the library.

[0381] An alternative approach to the use of random codons (NNK or one of the many others described above) is to synthesize oligonucleotides with the exact consensus sequence of the loop of a specific protein family. This approach requires that loop 2 designs are only incorporated in the loop 2 location of the library, and loop 3 sequences only in the loop 3 location. This can be achieved if the cysteines, where the overlap reaction occurs, each are encoded by a different one of the three cysteine codons. One to three bases before or after the cys codon can be fixed as well, in order to provide a more efficient overlap PCR reaction. The overlap reaction efficiency can limit the diversity of the library so this is an important risk which cannot be detected or controlled easily. In general, the addition of a few bases is an effective way to reduce the serious risk of low library diversity.

[0382] After mixing all of the loop sequences for the different families and incorporating them by overlap PCR, all of the synthetic loop sequences should only occur in their natural position. This library approach results in the shuffling of loops from different families relative to each other.

[0383] Increasing Library Diversity: The power of natural and directed evolution is related to the diversity that is subjected to selection pressure. Selections from a larger number of more diverse clones generally yield better outcomes. Organisms use multiple approaches to increase the diversity of protein structures beyond the number of genes. This expanded natural diversity provides more solutions for selection to act on and increases the power of natural evolution.

[0384] There are many different ways in which we can increase the diversity of structures that can be obtained from the same number of clones or number of sequences, with the goal of increasing the power of directed evolution.

[0385] This principle can be applied to the optimization of single genes, multi-gene pathways, whole genomes (prokaryotic, archaeal, eukaryotic) and even whole communities of organisms (ie microbial communities).

[0386] In general, expression of a single gene yields a variety of different mRNA sequences. This can be due to multiple promoters, due to alternative splicing, trans-splicing, or degradation. Each mRNA sequence can fold differently, adopting a variety of different structures and the outcome can also be modulated by the presence of other RNAs (micro-, tRNAs or mRNAs) as well as proteins that interact with RNA. Each of these mRNA structures can be translated somewhat differently, through the presence of multiple translation start and stop signals, variants with different pausing on the ribosome or a low but variable degree of misincorporation of amino acids, including ‘non-natural’ amino acids. In addition, each protein translation product can fold differently, some aggregating, some misfolding, some being degraded by proteases, some ubiquitinated and some folding into multiple stable structures. An important and practical differentiation mechanism is the derivatization of proteins, the chemical alteration of amino acid side chains and the chemical linking of small molecules such as sugars and polymers like PEG to the protein chain. These chemical approaches can be applied to the entire library (most) or to purified single proteins.

[0387] When applied to a library they can increase diversity dramatically, especially if applied sparingly, so that a heterogenous population results. For example, the non-exhaustive conjugation of a PEG or carbohydrate molecule to a Lysine residue on a protein library containing 5 lysines results in 5-factorial+1 types of molecules (122 variants). The best variants are selected by panning and now variants of the labeling recipe are applied to library equivalents, pools of clones or to single clones in order to discover which recipe gives the best results. In addition, the sequence of the proteins is evolved and selected for retention and improvement of the desired activity. The best mutant, for example, would have lost the four lysines that do not contribute to the activity and have kept the lysine that, when derivatized, results in an increased level of activity. All of the reagents that are used for derivatization of proteins (ie Pierce Chemical on-line catalog) can in principle be used for this approach. There is a fine balance between unique, stable structures for cellular function and diversity and some instability which can accelerate cellular evolution.

[0388] Each of these mechanisms is a potential point for experimental intervention: each of these controls was set at it's current level of variation by natural evolution but it's diversity could be increased or decreased depending on the goals of directed evolution.

[0389] An area of specific commercial interest is the directed evolution of binding proteins using display libraries (phage, yeast, bacterial surface, polysome, ribosome, pro-fusion, or gene-fusion libraries). It has been well-established that the frequency and quality of the best selected clones correlates directly with the size of the library. The larger the library, the higher the number of binders and the better the best will be. Because of this, a variety of approaches have been developed to create larger and larger libraries, such as the recombination method used to combine two immunoglobulin libraries of 10e6 clones into a single library of 10e12 clones. However, in this example all of the library proteins have the same immunoglobulin fold, which focuses the diversity into a single structure that is beneficial for some applications ie whole antibody products) but not suitable for creating a diversity of different structures. Rather than increasing the number of clones in the library, it is also possible to increase the effective library size by increasing the number of structures that can be created from a single sequence.

[0390] Rather than increasing library diversity by increasing the number of clones, an alternative approach to increasing library diversity is to increase the diversity of structures adopted by each clone. This can be obtained using destabilized proteins, which are more similar to a molten globule in that they exist as a large diversity of structures, each at a fraction of time. This approach allows searching of a much larger space including novel backbone structures that would not be accessed in a library of highly structured proteins. This more global search allows the identification of more globally optimal folds and further directed evolution can be used to create stably folded and homogeneously manufacturable variants of this novel fold.

[0391] The target is typically a protein, but could also be nucleic acid (DNA, RNA, PNA), carbohydrate, lipid, metabolite, or any biological or non-biological material). Because the library protein is (partially) unstructured, it adopts many different structures, each for a small fraction of time. This increases the molecular diversity of the library and favors the use of a large number of library equivalents. For panning a standard phage library one typically uses 100 library equivalents, or 10e12 phage if the library is 10e10 diversity. It has been found experimentally that this 100-fold excess is necessary to allow reliable recovery of a specific (structured) clone from a library. For high affinity clones one can use a lower excess, and for low affinity clones one should use a higher excess.

[0392] In contrast to other approaches for creating diversity, we will call this ‘temporal diversity’, because the diversity is obtained by multiple structures each occupying a fraction of time. The creation of diverse structures from the same single gene is an important principle for biological evolution and exists at many levels of biological organization.

[0393] Expanding the Diversity of Display Libraries:_Phage libraries typically contain about 10e14 phage with a diversity of 10e10 different sequences. It is well-established that affinity chromatography can select a single sequence expressing a binding protein out of such a library (10e10 enrichment). Since virtually 100% of the phage that can bind at high affinity will be bound by the affinity column, one can also predict that a single copy of a phage can also reliably be selected by this approach (10e14 enrichment).

[0394] A phage displayed peptide would typically exist in 10e3-10e6 different unstable conformations, only one of which binds to the column. Because column binding stabilizes the active conformation of the peptide, such peptides can be enriched efficiently, yielding an enrichment 10e17-10e20). Flexibility in the backbone conformation thus increases the effective library size to 10e20. After the first panning round, the diversity is typically already 1 000-fold reduced, so that in subsequent libraries each clone is represented by 1000 or more copies, which means that all of the different temporary structures that the proteins can adopt are statistically well represented. Over the course of further directed evolution the goal is to select for clones that spend an increasing fraction of their time in the structures with high affinity for the target. The goal is to gradually improve the affinity as well as the stability of the protein using various mutation approaches combined with selection.

[0395] Target-Induced Folding: The structure of the microprotein can be induced by target binding (by forming the disulfides after target binding), or the structure of the microprotein can be optimized while bound to it's target.

[0396] Binding to a target invariably involves some degree of induced fit and thus is expected to stabilize some of the disulfides (those in the part that is bound) and destabilize other disulfides, resulting in differential sensitivity to reducing agents. Titrating in reducing and oxidizing agents (at various concentrations and time intervals) allows rapid reducing and reoxidizing of the least stable disulfides, which, if there is a change in bonding pattern, results in structural adaptation and a better fit to the bound target, This approach increases the survival of clones with the best binding affinity.

[0397] For production, it may be desirable that the folding of the protein is evolved to be target-independent.

[0398] Optimizing the amino acid composition of microproteins:_Most proteins or protein domains comprise a hydrophobic core that is critical for protein stability and conformation. The hydrophobic core of these proteins contains a high fraction of hydrophobic amino acids. Amino acids can be characterized based on their hydrophobicity. A number of scales have been developed. A commonly used scale was developed by (Levitt, M (1976) J Mol Biol 104, 59, #3233), which is listed in (Hopp, T P, et al. (1981) Proc Natl Acad Sci USA 78, 3824, #3232). Hydrophobic residues can be further divided into the aliphatic residues leucine, isoleucine, valine, and methionine, and the aromatic residues tryptophan, phenylalanine, and tyrosine. FIG. 1 compares the abundance of amino acids in all proteins as published in Brooks, D J, et al. (2002) Mol Biol Evol 19, 1645, #3234 with the average amino acid abundance that was calculated for 8550 microprotein domains that are contained in the data base published in Gupta, A., et al. (2004) Protein Sci, 13: 2045-58.

[0399] See FIG. 13: Prevalence of amino acids in proteins. This figure reveals that microproteins tend to have a significantly lower abundance of aliphatic hydrophobic amino acids relative to other proteins, which has not been appreciated in the art. In contrast, the abundance of aromatic hydrophobic amino acids (W, F, Y) is similar to average proteins. This low abundance of aliphatic amino acids reflects the fact that microprotein structures are stabilized by several disulfide bonds, which obviates the need for a hydrophobic core. It reveals that several other amino acid residues that contain aliphatic carbon atoms (glutamate, lysine, alanine) also occur with reduced abundance in microproteins relative to other proteins.

[0400] Utility of scaffolds with low hydrophobicity: Reducing the abundance of aliphatic amino acids in proteins can significantly increase their utility in pharmaceutical and other applications. Many proteins have a tendency to form aggregates during folding. This can be aggravated when the protein is produced at high concentrations in a heterologous host and when the protein is renatured in vitro. Aggregation and misfolding can significantly reduce the yield of protein during commercial production. By reducing the fraction of aliphatic amino acids in a protein sequence, one can reduce the propensity to form aggregates and thus one can increase the yield of correctly folded protein.

[0401] Proteins with a low abundance of aliphatic amino acids have a lower immunogenicity relative to other proteins. Aliphatic amino acids tend to increase the binding of peptides to MHC, which is a critical step in the formation of an immune reaction. As a consequence, proteins containing a low fraction of aliphatic amino acids tend to contain fewer T cell epitopes relative to most other proteins.

[0402] Aliphatic residues have a propensity to form hydrophobic interactions. As a consequence, proteins with a large fraction of aliphatic amino acids are more likely to bind to other proteins, membranes, and other surfaces in a non-specific manner. Aliphatic residues that are exposed on the surface of a protein have a particularly high tendency to make non-specific binding interactions with other proteins. Most of the amino acids in a microprotein have some surface exposure due to the small size of microproteins.

[0403] Accordingly, the present invention provides a non-natural protein containing a single domain of 20-60 amino acids which has 3 or more disulfides, and wherein the protein binds to a human serum-exposed protein and has less than 5% aliphatic amino acids. Where desired, the a non-natural protein contains less than 4%, 3%, 2% or even 1% aliphatic amino acids. In addition, the present invention provides libraries of non-natural protein having such properties.

[0404] Identification of scaffolds with low hydrophobicity: Although most microproteins contain fewer aliphatic amino acids compared to most normal proteins, there is significant variation in the content of aliphatic amino acids between different microprotein families. Table 4 lists some families of microproteins that particularly useful as starting points for the engineering of pharmaceutical proteins with a low abundance of aliphatic residues.

[0405] Design of Proteins of Low Immunogenicity: Proteins of low immunogenicity are more desirable as therapeutics because they are less likely to elicit undesired immune response when administered into humans. In some aspects, the subject microproteins with desired target binding specificities are generally less immunogenic than proteins capable of binding to the same target but without the desired cysteine bonding pattern or fold. In one embodiment, the subject microproteins are 1-fold less, preferably 2-fold less, preferably 3-fold less, preferably 5-fold less, preferably 10-fold less, preferably 100-fold less, preferably 500-fold less, and even more preferably 1000-fold less immunogenic. In some embodiments, the microproteins of low immunogenicity are HDD proteins described herein.

[0406] The immunogenicity of proteins can be predicted using programs such as TEPITOPE, which, based on a large set of affinity measurements, calculate the binding affinity of all overlapping nine amino acid peptides derived from an immunogen to all major human HMC class II alleles (Sturniolo et al. 1999; xvww.biovatioii.com; www.epivax.com; www.algonomics.com). Such programs are widely used for the prediction and removal of human T-cell epitopes and their use is encouraged by the FDA.

[0407] Using these algorithms, we found that microproteins having 25-90 residues and more than 10% cysteine, typically have 316-fold lower predicted affinity for binding to MHCII than average proteins. The red curve in FIG. 166 shows the predicted immunogenicity of all 26,000 human proteins, with a median length of 372 amino acids. The blue curve shows the predicted immunogenicity of all 10,500 microproteins, with a median length of 38 amino acids. The green curve shows the predicted immunogenicity for a non-natural group of protein fragments with the same length distribution as the microproteins, but composed of randomly chosen human sequences. Comparison of the mean score for each group shows that the one-log reduced size of the microproteins alone leads to a 67-fold reduction in immunogenicity, and the amino acid composition of the microproteins yields an additional 4.7-fold reduction. FIG. 167 top panel shows that aliphatic hydrophobic amino acids (I,V,M,L) are ranked as the strongest contacts in the TEPITOPE algorithm (Sturniolo et al 1999), contributing most to the predicted immunogenicity. FIG. 167 bottom panel shows that these aliphatic residues are also the most underrepresented in microproteins compared to human proteins, accounting for most of the composition-derived one-log reduction in predicted immunogenicity.

[0408] The low level of aliphatic hydrophobic residues in microproteins is made possible by their lack of a hydrophobic core that is typical for other proteins. Instead, microproteins contain a small number of cysteines, which crosslink to form intrachain disulfides. This replacement of a large number of hydrophobic amino acids with a few disulfides reduces the minimum size at which the proteins are stable, allowing microproteins to be smaller and reducing the frequency of aliphatic amino acids, resulting in the three logs in reduction in predicted immunogenicity.

[0409] The reduced immunogenicity can be measured by a variety of indications, including e.g., 1) the capacity of the antigen presenting cell (APC) such as a dendritic cell (DC) to release peptides from the immune protein (antigen processing); 2) the presence of T-cell epitopes in these peptides which determines binding to HLA II molecules; 3) the number of naïve T cells in blood that recognize the peptide-HLAII complex on the APC surface; and 4) the level of antibodies in serum.

[0410] There exists numerous ways for lowing protein immunogenicity, all of which are applicable for HDD and non-HDD proteins. One approach is to add disulfides via computer modeling and rational design. Another approach is to improve existing disulfides by fine-tuning the protein using directed evolution or rational design. It may be possible to protect the disulfides from chemical attack by putting them in the interior of the protein or flanking the cysteines with amino acid side chains that have a protective effect. The immunogenicity of proteins can also be predicted using programs such as TEPITOPE or Propred, which, based on a large set of affinity measurements, calculate the binding affinity of all overlapping nine amino acid peptides derived from an immunogen to all major human HMC class II alleles (other programs are used for MHC class I). See Sturniolo, T., et al. (1999) Generation of tissue-specific and promiscuous HLA ligand databases using DNA microarrays and virtual HLA class II matrices. Nature Biotechnol, 17: 555. See also www.algonomics.com, www.biovation.com, www.epivax.com and www.genencor.com. Such programs are widely used for the prediction and removal of human T-cell epitopes and their use is encouraged by the FDA.

[0411] Yet another approach for generating less immunogenic microproteins is via intra-protein crosslinking using chemical crosslinking agents. A wide variety of crosslinkers are available from commercial vendors such as Pierce. Applicable crosslinkers include arginine-reactive cross-linkers, homobifunctional crosslinking agents such as amine-reactive homobifunctional crosslinking agents, sulfhydryl-reactive homobifunctional crosslinking agents, hetero-bifunctional crosslinking agent such as amine-carboxyl reactive heterobifunctional crosslinking agents and amino-group reactive heterobifunctional crosslinking agents.

[0412] Yet still another approach is to make a small protein with multiple binding sites and separate each domain into two or three binding sites. For instance, one face of the domain binds one target and the other half binds another target. The two faces can be designed in parallel (ie in separate libraries simultaneously) and then merged into one domain. The alternative is to design the two faces successively, creating one library in the residues on face 1 and panning this library for binding to target 1, selecting one or more of the best clones and creating a new library 2 in the remaining amino acids, those that were not used for library 1, followed by panning against target 2 and screening for binders to target 2 and retention of binding against target 1. Because the amino acids for face 1 tend to be interdigitated with the amino acids for face 2, the construction of these libraries into a pool of clones with different sequences can be readily performed if one keeps certain amino acids fixed, so that these fixed bases can provide the required contacts for overlap extension by PCR. Since the cysteines tend to be fixed, these are the logical choice as the overlap points for the different oligonucleotides. However, an overlap works better if it has 4 or more bases, so it is useful to fix one additional amino acid on either side of the cysteine. The scaffold for a two-face library thus has three sets of amino acids and bases: ones for face 1/library 1, ones for face 2/library2, and fixed ones for combining the two libraries by overlap extension. It is in principle possible to use restriction sites, but the overlap approach will generally work better.

[0413] Still another approach is to decrease protein size by minimizing the length of the intercysteine loops. A typical approach is to use a range of loop lengths in the library, some of which occur naturally and some that are shorter than what is found naturally.

[0414] Still another approach is to increasing hydrophilicity. Most of the HDD proteins are highly hydrophilic and this may be important for function (specificity, non-immunogenicity) as well as for folding of the protein. The hydrophilicity can be controlled by choosing the mix of amino acids used in each position in the protein library, picking (a mix of) the desired codons for the synthesis of the oligonucleotides. A good general approach is to mimic the natural composition of each amino acid position, but one can skew this to favor certain desired residues. Clones can be screened for size and for hydrophilicity by DNA sequencing. The various approaches described above can be employed alone or in combination.

[0415] Any of the subject microproteins can be employed for further modification. Non-limiting examples are HDD proteins such as modified A-domains, LNR/DSL/PD, TNFR, Anato, Beta Integrin, Kunitz, and the animal toxin families Toxin 1, 2, 3, 4, 5, 6, 7, 8, 9, 10, 11, 12, Myotoxins, Conotoxins, Delta- and Omega-Atracotoxins. The deimmunization approaches described here can be applied to a wide variety of human or primate proteins, such as cytokines, growth factors, receptor extracellular domains, chemokines, etc. It can also be applied to other non-HDD scaffold proteins, such as immunoglobulins including Fibronectin III, and to Ankyrin, Protein A, Ubiquitin, Crystallin, Lipocalin. Provided that immunogenicity can be minimized, non-human scaffolds are preferred over (near-) native human proteins and human-derived scaffolds because of the reduced potential for cross-reaction of the immune response with the native human protein.

[0416] A number of methods are available for assaying for a reduce immunogenicity of HDD proteins. For example, one can assay for protein degration by human or animal APCs. This assay involves addition of the protein of interest to human or animal antigen presenting cells, APC-derived lysosomes or APC proteases and looking for degradation of the protein, for example by SDS-PAGE. The APCs can be dendritic cells derived from blood monocytes, or obtained via other standard methods. One can use animal rather than human APC, or use cell lysates rather than whole cells, or use one or more purified enzymes or cell-fractions such as lysosomes. Degradation of the protein is most easily determined by denaturing SDS-PAGE gel analysis. Degraded proteins will run faster, at lower apparent molecular weight on the gel. The protein of interest needs to be detected in the large amount of cellular proteins. One way is to fluorescently or radioactively label each clone (radioactive: 3H, 14C, 35S; dyes and fluorescent labels like FITC, Rhodamine, Cy5, Cy3, etc.) or any other suitable chemical labels, so that only the protein of interest and its degradation products are visible on the gel upon UV exposure or autoradiography. It is also possible to use peptide-tagged proteins which can be detected using an antibody in Western blots.

[0417] Another approach to determine immunogenicity is to assay for the propensity of protein aggregation. Protein aggregation is easily determined by light scattering and can be performed with a dynamic light scattering instrument (DLS) or a spectrophotometer (ie OD 300-600 versus OD 280).

[0418] One can also assay for the level of T-cell stimulation and cytokine activation. Cytokine activation is measured on human PBMC's by FACS for the presence of activation antigens for dendritic cells (CD83 etc), T cell activation (CD69, IL-2r, etc.) as well as the presence of many co-stimulatory factors (CD28, CD80, CD86), all of which indicate that the immune system has been stimulated. Further the cells can be examined for production of cytokines such as IL-2,4,5,6,8,10, TNF alpha, beta, IFN gamma, Il-1 beta etc. using standard ELISA assays. The regular mitogens, and LPS etc. can serve as good controls.

[0419] Furthermore, one can assay for binding to Toll-receptors. Binding of the therapeutic protein to Toll-like receptors 1-9 (TLR1-TLR9) is a useful indicator of innate immunity. A number of commercial vendors such as Invivogen provide all of the transgenic Toll-receptors hooked up reporter genes in cellular constructs.

[0420] In addition, one can perform animal studies to assess protein immunogenicity by directly injecting the proteins into a host animal, such as rabbit and mouse.

[0421] The following provides an example of eEngineering of microproteins with low binding affinity for HLA II. See FIG. 161. Helper T cell activation is a key step and essential for the initiation of an immune reaction against a foreign protein. T cell activation involves the uptake of an antigen by an antigen presenting cell (APC), the degradation of the antigen into peptides, and the display of the resulting peptides on the surface of APCs as complex with proteins of the human leukocyte antigen DR group (HLA-DR). HLA-DR molecules contain multiple binding pockets that interact with presented peptides. The specificity of these HLA-DR pockets can be measured in vitro and the resulting specificity profiles can be used to predict the binding affinity of peptides to various HLA-DR types (Hammer, J. (1995) Curr Opin Immunol, 7: 263-9). Computer programs have been described that allow one to identify HLA-DR binding sequences (Sturniolo, T., et al. (1999) Nat Biotechnol, 17: 555-61). The current invention exploits these algorithms with the goal of modifying the sequences of microproteins in a way that reduces binding to HLA-DR while maintaining the desired pharmacological and other properties of the parent microprotein. As a first step the sequence of the parent microprotein is analyzed using a HLA-DR prediction algorithm. All possible single amino acid mutations of non-cysteine residues in the parent sequence are being compared with the parent sequence, and binding to HLA-DR types is predicted. Goal is to identify a set of mutations, that are predicted to reduce binding to HLA-DR types that occur at high frequency in the patient population that will be treated with the parent microprotein or with its derivatives. Subsequently, one constructs a combinatorial library where variants in the library contain one or more mutations that are predicted to reduce HLA-DR binding. It may be advantageous to construct several sub-libraries that contain subsets of the planned mutations. The resulting library or the sub-libraries can then be screened to identify variants that bind to the appropriate target. In addition, one can screen library members for stability, solubility, expression level, and other properties that are important for the final properties. Prior to screening, one can also subject the combinatorial library to phage panning or similar enrichment method to isolate combinatorial variants that retain the desired target-binding affinity and specificity. This process will identify variants of the parent microprotein that retain all desired properties of the parent protein but that are predicted to have reduced binding to HLA-DR and consequently reduced immunogenicity. Optionally, one can subject the resulting improved variants to a subsequent round of removal of HLA-DR binding sequences. This subsequent round can be a simply a repeat of the procedure described above. As an alternative, one can limit the second combinatorial library to mutations that were identified during round one of the process as compatible with the desired microprotein function and that were predicted to further reduce HLA-DR binding. By limiting the second round of the process to these pre-selected mutations one can construct smaller libraries and increase the frequency of isolating improved variants.

TABLE 4
Microprotein families with low abundance of aliphatic amino acids

| | | | Aliphatic amino | | |
|---|---|---|---|---|---|
| | | | acids | | |
| PFAM | Family size | Length | (%) | Description | Source |
| PF02977 | 3 | 27.0 | 0.00 | Carboxypeptidase A inh. | plants |
| PF05374 | 4 | 19.0 | 2.63 | Mu-Conotoxin | cone snails |
| | | | | fungal cellulose binding | |
| PF00734 | 42 | 18.1 | 4.07 | domain | fungal |
| PF00187 | 228 | 36.2 | 4.93 | chitin recognition protein | plants |
| PF06357 | 7 | 33.0 | 6.06 | omega-atratoxin | spiders |
| PF05294 | 11 | 32.6 | 7.24 | Scorption short toxin | scorpions |
| PF05453 | 6 | 24.0 | 7.64 | BmTXKS1 toxin family | scorpions |
| PF05353 | 5 | 42.2 | 8.06 | Delta atratoxin | |
| PF05375 | 24 | 29.5 | 8.63 | Pacifastin inhibitor | locust |
| PF00200 | 285 | 64.1 | 8.68 | Disintegrin | snakes |
| PF01033 | 68 | 35.6 | 9.00 | Somatomedin | mammalian |
| PF00304 | 105 | 44.8 | 9.08 | Gamma-thionin | plants |

[0422] Average proteins contain 26.1% aliphatic amino acids.

Methods to Reduce the Fraction of Hydrophobic Amino Acids in Therapeutic Proteins

[0423] As described above, one way to create microproteins with a low abundance of aliphatic amino acids is by starting with scaffolds and libraries that contain few aliphatic amino acids. In addition, one can reduce the abundance of aliphatic amino acids in a protein using a variety of protein engineering techniques. For instance, one can construct protein libraries such that one or several aliphatic amino acids have been replaced with random codons that allow for many hydrophilic amino acids to occur. Of particular interest are ambiguous codons which allow a large fraction of hydrophilic amino acids but a low fraction of aliphatic or hydrophobic amino acids. For example, the codon VVK allows the occurrence of 12 amino acids (alanine, aspartate, glutamate, glycine, histidine, lysine, asparagine, proline, glutamine, arginine, serine, threonine) and it avoids all aliphatic and aromatic amino acids. One can isolate proteins with desirable properties from such libraries and thus reduce the abundance of aromatic hydrophobic and aliphatic hydrophobic amino acids. One can also construct combinatorial protein libraries that randomize multiple amino acid positions that contain aliphatic amino acids. By determining the sequence and performance of multiple variants from such libraries, one can identify positions in said protein that allow replacement with hydrophilic amino acids.

Methods to Evaluate Scaffold Utility

[0424] Create design based on a specific family of natural sequences. In each amino acid position a mixture of amino acids is used that reflects the natural diversity of amino acids at that position. This is done by choosing the single most suitable codon. An HA tag is added to the N-terminal end of the protein and a His6 tag is added to the C-terminal end.

[0425] Oligonucleotides encoding these protein designs are synthesized. 1-30 different designs are constructed simultaneously, singly or as a mixture of different designs.

Expression of the Subject Composition

Intracellular Versus Extracellular Environment

[0426] Disulfide bonds are mainly found in secreted (extracytosolic) proteins. Their formation is catalyzed by a number of enzymes present in the endoplasmic reticulum (ER) of multicellular organisms. On the other hand, disulfide bonds are generally not found in cytosolic proteins under non-stress conditions. This is due to the presence of reductive systems such as glutathione reductase and thioredoxin reductase, which protect free cysteines from oxidation. For example, ribonucleotide reductase forms a disulfide bond during its reaction cycle and reduction of this disulfide bond is essential for the reaction to proceed (Prinz, J Biol. Chem. 272(25):15661).

[0427] Natural microproteins are expressed by bacteria, animals (sanemones, snails, insects, scorpions, snakes) and plants. However, heterologous expression of recombinant microproteins has generally been performed in E. coli, although Bacillus subtilis, yeast (Saccharomyces, Kluyveromyces, Picchia), and filamentous fungi such as Aspergillus and Fusarium, as well as mammalian cell lines such as CHO, COS or PerC6 could also be used for expression of microproteins. In the literature examples heterologously expressed microproteins are typically produced in the cytoplasm of E. coli.

[0428] An alternative to recombinant expression is chemical synthesis. Microproteins are small enough to allow chemical synthesis and could be manufactured by synthesis at an economically viable cost.

[0429] Unrelated products that contain disulfides (most Ig-domain-containing products, including Ab fragments and whole Abs) are generally produced in mammalian tissue culture or in E. coli by secretion into the periplasm or into the medium. Secreted products have a signal peptide which is proteolytically removed, leaving the N-terminal residue unformylated. In contrast. Proteins produced in the cytoplasm of E. coli frequently retain the N-terminal formyl-Methionine, depending on the amino acid(s) following the fMet. The literature describes which amino acids following the fMet result in fMet removal.

[0430] While Microproteins are almost completely absent from bacteria and archaea (some exceptions), all of the hydrophilic microproteins can readily be made in E. coli.

[0431] There are a few bacterial microproteins, such as the heat-stable enterotoxin from E. coli (called ST-Ia and ST-Ib) and related enterobacteria. Heat stable enterotoxins such as STa (PFAM 02048) and STb are unrelated on the sequence level. Sequence alignments of St-!a show a 72aa precursor. The protein is processed by two independent proteolytic cleavage events to yield the mature toxin, which contains three disulfide bonds with a topology of 14 25 36. The motif for ST-Ia is CxxxxxxxxxxxxxxxxxxxxCCxxCCxxxCxxC.

[0432] A promising way to express microproteins and to secrete microproteins into the media may be to use the ST-Ia promoter and leader peptide and precursor, but hooked up to a different microprotein, replacing the current 3SS 14 25 36 module with a different microprotein. ST-Ia is secreted into the medium (not periplasm), which is very rare for E. coli and explains how the disulfides are formed. It is likely to have a specialized leader peptide that allows it to be secreted from E. coli via one the 3 or 4 different specialized secretion systems. Hooked up to there microproteins, this leader peptide may allow efficient secretion and disulfide bond formation of other microproteins as well and may be useful for rapid screening of culture supernatants.

[0433] Microproteins can be produced in a variety of expression systems including prokaryotic and eukaryotic systems. Suitable expression hosts are for instance yeast, fungi, mammalian cell culture, insect cells. Of particular interest are bacterial expression systems using E. coli, Bacillus or other host organisms. Heterologous expression of microproteins is typically performed in the cytoplasm of E. coli. The disulfide bonds generally do not form inside the cytoplasm, since it is a reductive environment, but they are formed after the cells are lysed. The characterization and purification of microproteins can be facilitated by heating the cells after protein expression. This process leads to cell lysis and to the precipitation of most E. coli proteins. (Silverman, J., et al. (2005) Nat Biotechnol) . The expression level of different microproteins in E. coli can be compared using colony screens, if the microprotein is fused to a reporter like GFP or an enzyme like HRP, beta-lactamase, or Alkaline Phosphatase. Of particular interest are heat and protease stable enzymes as they allow to assay the stability of microproteins under conditions of heat or protease stress. Examples are calf intestinal alkaline phosphatase or a thermostable variant of beta-lactamase (Amin, N., et al. (2004) Protein Eng Des Sel, 17: 787-93). The fusion of microproteins to enzymes or reporters also facilitates the analysis of their binding properties as one can detect target-bound microproteins by the presence of the reporter enzyme. Microproteins can be expressed as a fusion with one or more epitope tags. Examples are HA-tag, His-tag, myc-tag, strep-tag, E-tag, T7-tag. Such tags facilitate the purification of samples and they can be used to measure binding properties using sandwich ELISAs or other methods. Many other assays have been described to detect binding properties of protein or peptide ligand and these methods can be applied to microproteins. Examples are surface plasmon resonance, scintillation proximity assays, ELISAs, AlphaScreen (Perkin Elmer), Betagalactosidase enzyme fragment complementation assay (CEDIA).

[0434] Heterologous expression of microproteins is typically performed in the cytoplasm of E. coli. The disulfide bonds generally do not form inside the cytoplasm, since it is a reductive environment, but they are formed after the cells are lysed. The expression level of different microproteins in E. coli can be compared using colony screens, if the microprotein is fused to a reporter like GFP or an enzyme like HRP or Alkaline Phosphatase (preferably a heat stable version such as calf intestinal alkaline phosphatase).

[0435] The invention also encompasses fusion proteins comprising cysteine-containing scaffolds disclosed herein and fragments thereof. Such fusion may be between two or more scaffolds of the invention and a related or unrelated scaffolds. Useful fusion partners include sequences that facilitate the intracellular localization of the polypeptide, or prolong serum half life reactivity or the coupling of the polypeptide to an immunoassay support or a vaccine carrier.

Variation in Stability of Disulfide Bonds

[0436] In general, there is certain variation in the stability of disulfide bonds in proteins. For example, disulfide bonds in secreted proteins tend to be more stable than “unwanted” disulfide bonds in cytosolic proteins. In general, disulfide bonds are resistant to reduction if they are buried and according to Wedemeyer et al. disulfide bonds are generally buried. Thus, disulfide bonds in secretory proteins are rather resistant to reduction if fully folded, and low concentrations of denaturant have to be added to induce local unfolding which will make disulfide bonds accessible.

[0437] When a protein with multiple disulfide bonds is targeted to the cytosol in its folded state and the protein remains folded during uptake, its disulfide bonds may be resistant to reduction. A prerequisite for this is that none of the disulfide bonds are accessible to reducing agent. In the cytosol, thioredoxin and glutathione serve as direct oxidants for disulfide bonds. Due to their larger molecular weight compared to DTT, access to buried disulfide bonds in folded proteins should be limited.

[0438] The accessibility of disulfide bonds in proteins can be determined in silico using crystal structures or experimentally by NMR and can be compared with a titration of the denaturation sensitivity (ie D50 is the concentration of reducing agent at which 50% of the wildtype disulfides are present and 50% are not present.

Covalent Binding to Targets

[0439] Some proteins are able to covalently bind to other proteins by the exchange of disulfide bonds, resulting in exceptional binding affinity. One useful example is minicollagen, in which a c-terminal tail sequence binds covalently to an N-terminal head sequence, leading to the formation of 6 disulfides between the two proteins. See FIG. 113.

Screening and Characterization Tools

[0440] The protein libraries and the individual protein clones that come out of the early cycles of the 234, 3x0-8, 4x0-8 and 4×6 approaches described above tend to fold heterogeneously.

[0441] To some extent, one can ignore the heterogeneity and continue to evolve the proteins by directed evolution until proteins with the desired properties are obtained, notably high affinity (typically picomolar) and high specificity, but also homogenous folding and high expression level, so that the protein can be manufactured.

Methods to Construct and Pan Phage Libraries

Types of Display

[0442] A large variety of methods has been described that allow one to identify binding molecules in a large library of variants. One method is chemical synthesis. Library members can be synthesized on beads such that each bead carries a different peptide sequence. Beads that carry ligands with a desirable specificity can be identified using labeled binding partners. Another approach is the generation of sub-libraries of peptides which allows one to identify specific binding sequences in an iterative procedure (Pinilla, C., et al. (1992) BioTechniques, 13: 901-905). More commonly used are display methods where a library of variants is expressed on the surface of a phage, protein, or cell. These methods have in common, that that DNA or RNA coding for each variant in the library is physically linked to the ligand. This enables one to detect or retrieve the ligand of interest and then determine its peptide sequence by sequencing the attached DNA or RNA. Display methods allow one skilled in the art to enrich library members with desirable binding properties from large libraries of random variants. Frequently, variants with desirable binding properties can be identified from enriched libraries by screening individual isolates from an enriched library for desirable properties. Examples of display methods are fusion to lac repressor (Cull, M., et al. (1992) Proc. Natl. Acad. Sci. USA, 89: 1865-1869), cell surface display (Wittrup, K. D. (2001) Curr Opin Biotechnol, 12: 395-9). Of particular interest are methods were random peptides or proteins are linked to phage particles. Commonly used are M13 phage (Smith, G. P., et al. (1997) Chem Rev, 97: 391-410) and T7 phage (Danner, S., et al. (2001) Proc Natl Acad Sci USA, 98: 12954-9). There are multiple methods available to display peptides or proteins on M13 phage. In many cases, the library sequence is fused to the N-terminus of peptide pIII of the M13 phage. Phage typically carry 3-5 copies of this protein and thus phage in such a library will in most cases carry between 3-5 copies of a library member. This approach is referred to as multivalent display. An alternative is phagemid display where the library is encoded on a phagemid. Phage particles can be formed by infection of cells carrying a phagemid with a helper phage. (Lowman, H. B., et al. (1991) Biochemistry, 30: 10832-10838). This process typically leads to monovalent display. In some cases, monovalent display is preferred to obtain high affinity binders. In other cases multivalent display is preferred (O'Connell, D., et al. (2002) J Mol Biol, 321: 49-56).

[0443] A variety of methods have been described to enrich sequences with desirable characteristics by phage display. One can immobilize a target of interest by binding to immunotubes, microtiter plates, magnetic beads, or other surfaces. Subsequently, a phage library is contacted with the immobilized target, phage that lack a binding ligand are washed away, and phage carrying a target specific ligand can be eluted by a variety of conditions. Elution can be performed by low pH, high pH, urea or other conditions that tend to break protein-protein contacts. Bound phage can also be eluted by adding E. coli cells such that eluting phage can directly infect the added E. coli host. An interesting protocol is the elution with protease which can degrade the phage-bound ligand or the immobilized target. Proteases can also be utilized as tools to enrich protease resistant phage-bound ligands. For instance, one can incubate a library of phage-bound ligands with one or more (human or mouse) proteases prior to panning on the target of interest. This process degrades and removes protease-labile ligands from the library (Kristensen, P., et al. (1998) Fold Des, 3: 321-8). Phage display libraries of ligands can also be enriched for binding to complex biological samples. Examples are the panning on immobilized cell membrane fractions (Tur, M. K., et al. (2003) Int J Mol Med, 11: 523-7), or entire cells (Rasmussen, U. B., et al. (2002) Cancer Gene Ther, 9: 606-12; Kelly, K. A., et al. (2003) Neoplasia, 5: 437-44). In some cases one has to optimize the panning conditions to improve the enrichment of cell specific binders from phage libraries (Watters, J. M., et al. (1997) Immunotechnology, 3: 21-9). Phage panning can also be performed in live patients or animals. This approach is of particular interest for the identification of ligands that bind to vascular targets (Arap, W., et al. (2002) Nat Med, 8: 121-7).

Cloning Methods to Construct Libraries

[0444] The literature describes a large variety of methods that allow one skilled in the art to generate libraries of DNA sequences that encode libraries of peptide ligands. Random mixtures of nucleotides can be utilized to synthesize oligonucleotides that contain one or multiple random positions. This process allows one to control the number of random positions as well as the degree of randomization. In addition, one can obtain random or semi-random DNA sequences by partial digestion of DNA from biological samples. Random oligonucleotides can be used to construct libraries of plasmids or phage that are randomized in pre-defined locations. This can be done by PCR fusion as described in (de Kruif, J., et al. (1995) J Mol Biol, 248: 97-105). Other protocols are based on DNA ligation (Felici, F., et al. (1991) J Mol Biol, 222: 301-10; Kay, B. K., et al. (1993) Gene, 128: 59-65). Another commonly used approach is Kunkel mutagenesis where a mutagenized strand of a plasmid or phagemid is synthesized using single stranded cyclic DNA as template. See, Sidhu, S. S., et al. (2000) Methods Enzymol, 328: 333-63; Kunkel, T. A., et al. (1987) Methods Enzymol, 154: 367-82.

[0445] Kunkel mutagenesis uses templates containing randomly incorporated uracil bases which can be obtained from E. coli strains like CJ236. The uracil-containing template strand is preferentially degraded upon transformation into E. coli while the in vitro synthesized mutagenized strand is retained. As a result most transformed cells carry the mutagenized version of the phagemid or phage. A valuable approach to increase diversity in a library is to combine multiple sub-libraries. These sub-libraries can be generated by any of the methods described above and they can be based on the same or on different scaffolds.

[0446] A useful method to generate large phage libraries of short peptides has been recently described (Scholle, M. D., et al. (2005) Comb Chem High Throughput Screen, 8: 545-51). This method is related to the Kunkel approach but it does not require the generation of single stranded template DNA that contains random uracil bases. Instead, the method starts with a template phage that carries one or more mutations close to the area to be mutagenized and said mutation renders the phage non-infective. The method uses a mutagenic oligonucleotide that carries randomized codons in some positions and that correct the phage-inactivating mutation in the template. As a result, only mutagenized phage particles are infective after transformation and very few parent phage are contained in such libraries. This method can be further modified in several ways. For instance, one can utilize multiple mutagenic oligonucleotides to simultaneously mutagenize multiple discontiguous regions of a phage. We have taken this approach one step further by applying it to whole microproteins of >25, 30, 35, 40, 45, 50, 55 and 60 amino acids, instead of short peptides of <10, 15 or 20 amino acids, which poses an additional challenge. This approach now yields libraries of more than 10e10 transformants (up to 10e11) with a single transformation, so that a single library with a diversity of 10e12 is expected from 10 transformations.

[0447] Methods for Re-Mutagenesis

[0448] A novel variation of the Scholle method is to design the mutagenic oligonucleotide such that an amber stop codon in the template is converted into an ochre stop codon, and an ochre into an amber in the next cycle of mutagenesis. In this case the template phage and the mutagenized library members must be cultured in different suppressor strains of E. coli, alternating an ochre suppressor with amber suppressor strains. This allows one to perform successive rounds of mutagenesis of a phage by alternating between these two types of stop codons and two suppressor strains.

[0449] Another novel variation of the Scholle approach involves the use of megaprimers with a single stranded phage DNA template. The megaprimer is a long ssDNA that was generated from the library inserts of the selected pool of phage from the previous round of panning. The goal is to capture the full diversity of library inserts from the previous pool, which was mutagenized in one or more areas, and transfer it to a new library in such a way that an additional area can be mutagenized. The megaprimer process can be repeated for multiple cycles using the same template which contains a stop-codon in the gene of interest. The megaprimer is a ssDNA (optionally generated by PCR) which contains 1) 5′ and 3′ overlap areas of at least 15 bases for complementarity to the ssDNA template, and 2) one or more previously selected library areas (1,2,3,4 or more) which were copied (optionally by PCR) from the pool of previously selected clones, and 3) a newly mutagenized library area that is to be selected in the next round of panning. The megaprimer is optionally prepared by 1) synthesizing one or more oligonucleotides encoding the newly synthesized library area and 2) by fusing this, optionally using overlap PCR, to a DNA fragment (optionally obtained by PCR) which contains any other library areas which were previously optimized. Run-off or single stranded PCR of the combined (overlap) PCR product is used to generate the single stranded megaprimer that contains all of the previously optimized areas as well as the new library for an additional area that is to be optimized in the next panning experiment. See FIG. 28. This approach is expected to allow affinity maturation of proteins using multiple rapid cycles of library creation generating 10e11 to 10e12 diversity per cycle, each followed by panning.

[0450] A variety of methods can be applied to introduce sequence diversity into (previously selected or naïve) libraries of microproteins or to mutate individual microprotein clones with the goal of enhancing their binding or other properties like manufacturing, stability or immunogenicity. In principle, all the methods that can be used to generate libraries can also be used to introduce diversity into enriched (previously selected) libraries of microproteins. In particular, one can synthesize variants with desirable binding or other properties and design partially randomized oligonucleotides based on these sequences. This process allows one to control the positions and degree of randomization. One can deduce the utility of individual mutations in a protein from sequence data of multiple variants using a variety of computer algorithms (Jonsson, J., et al. (1993) Nucleic Acids Res, 21: 733-9; Amin, N., et al. (2004) Protein Eng Des Sel, 17: 787-93). Of particular interest for the re-mutagenesis of enriched libraries is DNA shuffling (Stemmer, W. P. C. (1994) Nature, 370: 389-391), which generates recombinants of individual sequences in an enriched library. Shuffling can be performed using a variety modified PCR conditions and templates may be partially degraded to enhance recombination. An alternative is the recombination at pre-defined positions using restriction enzyme-based cloning. Of particular interest are methods utilizing type IIS restriction enzymes that cleave DNA outside of their sequence recognition site (Collins, J., et al. (2001) J Biotechnol, 74: 317-38. Restriction enzymes that generate non-palindromic overhangs can be utilized to cleave plasmids or other DNA encoding variant mixtures in multiple locations and complete plasmids can be re-assembled by ligation (Berger, S. L., et al. (1993) Anal Biochem, 214: 571-9). Another method to introduce diversity is PCR-mutagenesis where DNA sequences encoding library members are subjected to PCR under mutagenic conditions. PCR conditions have been described that lead to mutations at relatively high mutation frequencies (Leung, D., et al. (1989) Technique, 1: 11-15). In addition, a polymerase with reduced fidelity can be employed (Vanhercke, T., et al. (2005) Anal Biochem, 339: 9-14). A method of particular interest is based on mutator strains (Irving, R. A., et al. (1996) Immunotechnology, 2: 127-43; Coia, G., et al. (1997) Gene, 201: 203-9). These are strains that carry defects in one or more DNA repair genes. Plasmids or phage or other DNA in these strains accumulate mutations during normal replication. One can propagate individual clones or enriched populations in mutator strains to introduce genetic diversity. Many of the methods described above can be utilized in an iterative process. One can apply multiple rounds of mutagenesis and screening or panning to entire genes, or to portions of a gene, or one can mutagenize different portions of a protein during each subsequent round (Yang, W. P., et al. (1995) J Mol Biol, 254: 392-403).

Library Treatments

[0451] Known artifacts of phage panning include 1) no-specific binding based on hydrophobicity, and 2) multivalent binding to the target, either due to a) the pentavalency of the pIII phage protein, or b) due to the formation of disulfides between different microproteins, resulting in multimers, or c) due to high density coating of the target on a solid support and 3) context-dependent target binding, in which the context of the target or the context of the microproteins becomes critical to the binding or inhibition activity. Different treatment steps can be taken to minimize the magnitude of these problems. Ideally such treatments are applied to the whole library (Library Treatments), but some useful treatments that remove bad clones can only be applied to pools of soluble proteins or only to individual soluble proteins.

[0452] Libraries of microproteins are likely to contain have that contain free thiols, which can complicate directed evolution by cross-linking to other proteins. One approach is to remove the worst clones from the library by passing it over a free-thiol column, thus removing all clones that have one or more free sulfhydryls. Clones with free SH groups can also be reacted with biotin-SH reagents, enabling efficient removal of clones with reactive SH groups using Streptavidin columns. Another approach is to not remove the free thiols, but to inactivate them by capping them with sulfhydryl-reactive chemicals such as iodoacetic acid. Of particular interest are bulky or hydrophilic sulfhydryl reagents that reduce the non-specific target binding or modified variants.

[0453] Examples of context dependence are all of the constant sequences, including pIII protein, linkers, peptide tags, biotin-streptavidin, Fc and other fusion proteins that contribute to the interaction. The typical approach for avoiding context-dependence involves switching the context as frequently as practical in order to avoid buildup. This may involve alternating between different display systems (ie M13 versus T7, or M13 versus Yeast), alternating the tags and linkers that are used, alternating the (solid) support used for immobilization (ie immobilization chemistry) and alternating the target proteins itself (different vendors, different fusion versions).

[0454] Library Treatments can also be used to select for proteins with preferred qualities. One option is the treatment of libraries with proteases in order to remove unstable variants from the library. The proteases used are typically those that would be encountered in the application. For pulmonary delivery, one would use lung proteases, for example obtained by a pulmonary lavage. Similarly, one would obtain mixtures of proteases from serum, saliva, stomach, intestine, skin, nose, etc. However, it is also possible to use mixtures of single purified proteases. An extensive list of proteases is shown in Appendix E. The phage themselves are exceptionally resistant to most proteases and other harsh treatments.

[0455] For example, it is possible to select the library for the most stable structures, ie those with the strongest disulfide bonds, by exposing it to increasing concentrations of reducing agents (ie DTT or betamercaptoethanol), thus eliminating the least stable structures first. One would typically use reducing agent (ie DTT, BME, other) concentrations from 2.5 mM, to 5 mM, 10 mM, 20 mM, 30 mM, 40 mM, 50 mM, 60 mM, 70 mM, 80 mM, 90 mM or even 100 mM, depending on the desired stability.

[0456] It is also possible to select for clones that can be efficiently refolded in vitro, by reducing the entire display library with a high level of reducing agent, followed by gradually re-oxidizing the protein library to reform the disulfides, followed by the removal of clones with free SH groups, as described above. This process can be applied once or multiple times to eliminate clones that have low refolding efficiency in vitro.

[0457] One approach is to apply a genetic selection for protein expression level, folding and solubility as described by A. C. Fisher et al. (2006) Genetic selection for protein solubility enabled by the folding quality control feature of the twin-arginine translocation pathway. Protein Science (online). After panning of display libraries (optional), one would like to avoid screening thousands of clones at the protein level for target binding, expression level and folding. An alternative is to clone the whole pool of selected inserts into a betalactamase fusion vector, which, when plated on betalactam, the authors demonstrated to be selective for well-expressed, fully disulfide bonded and soluble proteins.

[0458] Following M13 Phage display of protein libraries and panning on targets for one or more cycles, there are a variety of ways to proceed:

[0459] Screening of individual phase clones by Phase ELISA. This measures the number of phage particles (using anti-M13 antibodies) that bind to an immobilized target

[0460] Transfer from M13 into T7 Phage display libraries. Any single library format tends to favor clones that can form high-avidity contacts with the target. This is the reason that screening of soluble proteins is important, although this is a tedious solution. The multivalency achieved in T7 phage display is likely very different from that achieved in M13 display, and cycling between T7 and M13 may be an excellent approach to reducing the occurrence of false positives based on valency.

[0461] Filter lift. Filter lifts can be made of bacterial colonies grown at high density on large agar plates (10e2-10e5). Small amounts of some proteins are secreted into the media and end up bound to the filter membrane (nitrocellulose or nylon). The filters are then blocked in non-fat milk, 1% Casein hydrolysate or a 1% BSA solution and incubated with the target protein that has been labeled with a fluorescent dye or an indicator enzyme (directly or indirectly via antibodies or via biotin-streptavidin). The location of the colony is determined by overlaying the filter on the back of the plate and all of the positive colonies are selected and used for additional characterization. The advantage of filter lifts is that it can be made to be affinity-selective by reading the signal after washing for different periods of time. The signal of high affinity clones ‘fades’ slowly, whereas the signal of low affinity clones fades rapidly. Such affinity characterization typically requires a 3-point assay with a well-based assay and may provide better clone-to-clone comparability than well-based assays. Gridding of colonies into an array is useful since it minimizes differences due to colony size or location.

Pharmaceutical Composition

[0462] The present invention also provides pharmaceutical compositions comprising the subject cysteine-containing proteins. They can be administered orally, intranasally, parenterally or by inhalation therapy, and may take the form of tablets, lozenges, granules, capsules, pills, ampoules, suppositories or aerosol form. They may also take the form of suspensions, solutions and emulsions of the active ingredient in aqueous or nonaqueous diluents, syrups, granulates or powders. In addition, the pharmaceutical compositions can also contain other pharmaceutically active compounds or a plurality of compounds of the invention.

[0463] The cysteine-containing proteins of this invention also can be combined with various liquid phase carriers, such as sterile or aqueous solutions, pharmaceutically acceptable carriers, suspensions and emulsions. Examples of non-aqueous solvents include propyl ethylene glycol, polyethylene glycol and vegetable oils.

[0464] More particularly, the pharmaceutical compositions the present may be administered for therapy by any suitable route including oral, rectal, nasal, topical (including transdermal, aerosol, buccal and sublingual), vaginal, parental (including subcutaneous, intramuscular, intravenous and intradermal) and pulmonary. It will also be appreciated that the preferred route will vary with the condition and age of the recipient, and the disease being treated.

Product Formats

[0465] A wide variety of product formats (e.g., see FIG. 159) is contemplated for use in a diversity of applications including reagents, diagnostics, prophylactics, ex vivo therapeutics and specialized formats for different drug delivery approaches for in vivo therapeutics, such as intravenous, subcutaneous, intrathecal, intraocular, transcleral, intraperitoneal, transdermal, oral, buccal, intestinal, vaginal, nasal, pulmonary and other forms of drug administration.

[0466] Such product formats include domain monomers and domain multimers (products with 2,3,4,5,6,7,8,9,10,15,20,30,40,50 or even 100 domains in a single or multiple protein chains. The domains may not contain only unique sequence or structural motifs, or it may contain duplicated sequence or structure motifs, or more highly repetitive sequence or structure motifs (repeat proteins). Each domains may have a single continuous or discontinuous (spatially or sequence-defined) binding site for 1,2,3,4,5,6,7,8,9 or 10 different targets. The targets can be a therapeutic, diagnostic (in vivo, in vitro), reagent or materials target, and may be (a combination of) protein, carbohydrate, lipid, metal or any other biological or non-biological material. Domain monomers and multimers may have multiple binding sites for the same target, optionally resulting in avidity. Domain multimers may also have 1,2,3,4,5,6,7,8 or more binding sites for different targets, resulting in multispecificity. Domain multimers optionally contain peptide linkers ranging in length from 1,2,3,4,5,6,7,8,9,10,12,14,16,18,20,25,30AA. A variety of elements can be fused to these domains, such as linear or cyclic peptides containing tags (e.g. for detection or purification with antibodies or Ni-NTA).

[0467] Halflife extension formats: A preferred approach is to use fuse a peptide (linear, mono-cyclic or dicyclic, meaning it contains 0,1 or 2 disulfides) or a protein domain that provides binding to serum albumin, immunoglobulins (ie IgG), erythrocytes, or other blood molecules or serum-accessible molecules in order to extend the serum excretion halflife of the product to the desired secretion halflife duration, which may range from 1,2,4,8, or 16 hours to 1,2,3,4,5, or 6 days to 1 week, 2 weeks, 3 weeks or 1,2 3 months. An alternative approach is to design a domain such that it binds to the pharmaceutical target as well as to a halflife extension target, such as serum albumin, using different binding sites which may or may not be partially overlapping. A desirable approach is to create scaffolds that are randomized in one area and selected to bind to the halflife target (ie HSA) and these constructs are then used to randomize additional areas that are designed to bind to one or more pharmaceutical targets, resulting in a domain that bind both the halflife target as well as the pharmaceutical target. Domains that provide halflife extension by binding to serum-proteins or serum-exposed proteins can also be fused to non-microproteins, such as, for example, human cytokines, growth factors and chemokines. An optional application is to extend the halflife of such human proteins or to target the human protein to specific tissues. The affinity preferred for such an interaction may be less than (or more than) 10 uM, 1 uM, 100 nM, 10 nM, 1 nM, 0.1 nM. Another option is to fuse long, unstructured, flexible glycine-rich sequences to the domain(s) in order to extend their Stokes' hydrodynamic radius and thereby prolong their serum secretion halflife. Another option is to link domains covalently to other domains not via a peptide bond, but by disulfide bonds or other chemical linkages. Another option is to chemically conjugate small molecules (including pharmaceutically active pharmacophores), radiolabels (ie chelates) and PEG or PEG-like molecules or carbohydrates to the protein.

[0468] Alternative delivery formats: The properties of average microproteins are exceptionally well suited for most alternative (non-injectable) delivery formats (size, protease stability, solubility, hydrophilicity), and engineering would be used to further improve their potential for a specific preferred delivery format. Werle, M. et al. (2006) J. Drug Targeting 14:137-146 show that three different microproteins are highly resistant to proteases such as elastase, pepsin, chymotrypsin as well as to plasma proteases (serum) and intestinal membrane proteases (2/3). They also show that the apparent mobility coefficient (Papp) of two microproteins was 3-fold higher than expected from a standard curve created for a variety of peptides and small proteins. For transport across tissue barriers, such as nasal, transdermal, oral, buccal, intestinal or transcleral transport, the efficiency and bioavailability is primarily determined by the size of the protein. A variety of excipients have been reported to improve transport of protein pharmaceuticals up to about 10-fold, such as alkylsaccharides (Maggio, E. (2006) Drug Delivery Reports; Maggio, E. (2006) Expert Opinion in Drug Delivery 3: 1-11. Some of these transport enhancers are either GRAS or are used as food additives so their use in pharmaceuticals may not require a lengthy FDA approval process. Some of these enhancer are amphipathic/amphiphilic and able to form micelles because they have a hydrophilic part (ie carbohydrate) and a hydrophobic part (ie alkyl chain). It may be feasible to mimic this using hydrophilic and hydrophobic protein sequences that are genetically fused to microproteins and non-microprotein peptides or proteins. For example, the hydrophilic sequence could be rich in glycine (non-ionic), glutamate and aspartate (negatively charged), or lysine and arginine (positively charged), and the hydrophobic sequence could be rich in tryptophan. Proteins with a protruding hydrophobic tail (ie 5-20 tryptophan residues) may be used to obtain an extended halflife because of the insertion of the poly-tryptophan into cellular membranes, similar to hydrophobic drugs which achieve a long halflife by membrane insertion. The protein itself remains unaltered so it's binding specificity is not expected to be reduced, only it's (micro-)biodistribution is altered. An alternative approach is to conjugate to the microprotein peptides or small molecules that are known to bind and be internalized by drug transporters such as PepT1, PepT2, HPT1, ABC transporters). References are Lee, VHL (2001) Mucosal drug delivery. J Natl Cancer Inst Monogr 29:41-44; and Kunta J R and Sinko, P J (2004) Intestinal drug transporters: in vivo function and clinical importance. Current Drug Metabolism 5:109-124; Nielsen, CU and Brodin, B (2003) Di-/Tri-peptide transporters as drug delivery targets: Regulation of transport under physiological and patho-physiological conditions. Current Drug Targets 4:373-388; Blanchette, J. et al. (2004) Principles of transmucosal delivery of therapeutic agents, Biomedicine & Pharmacotherapy 58:142-152. Dietrich, C G et al. (2005); ABC of oral bioavailability: transporters as gatekeepers in the gut. Gut 52:1788-1795; Yang C Y et al. (1999) Intestinal Peptide transport systems and oral drug availability. Pharmaceutical Research 16: 1331-1343.

[0469] Microproteins are ideally suited for topical delivery because no halflife extension is required. Microproteins can be delivered via depot formulations in order to obtain continuous delivery with a single administration.

[0470] Depot formulations (such as implants, nanospheres, microspheres, and injectable solutions such as gels) can do not require that the drug (in soluble form) has an extended halflife, although some halflife extension may still be beneficial.

[0471] Polymerization of microprotein domains and polypeptide spacers of various amino acid compositions into long polymers which are viscous is expected to yield a depot from which soluble drug is slowly released. These polymers can be fused to the microprotein or they can be separate proteins. The viscous liquid would be injected subcutaneously or submuscularly. Instead of using protein polymers, one can also mix the protein with a variety of other biodegradable matrices, such as polyanhydrides or polyesters or PLG (poly(D,L-lactide-co-glycolide)) or SAIB (sucrose acetate isobutyrate) or poly-ethylene glycol (PEG) and other hydrogels, lipid foams, collagens and hyaluronic acids. The small size, high protease, mechanical and thermal resistance and high hydrophilicity make microproteins suites for challenging formulations that most other proteins cannot achieve. Because of their small size, microproteins are well suited for iontophoresis, powder gun delivery, acoustic delivery, and delivery by electroporation (Cleland, J L et al. (2001)

[0472] Emerging protein delivery methods. Current Opinion in Biotechnology 12:212-219).

[0473] Oral delivery of fusion proteins: A different approach to oral transport involves fusion of the microprotein drug to existing bacterial toxins such as Pseudomonas Exotoxin (PE38, PE40), which are capable of traversing the cell membrane and delivering the drug into the cytoplasm of the cell. This approach has been demonstrated to work for delivery of protein drugs inside cells (ie tumor cells) as well as for efficient oral delivery, meaning transfer from the intestinal lumen into the bloodstream (Mrsny, R J et al., (2002) Bacterial toxins as tools for mucosal vaccination. Drug Discovery Today 4:247-258).

[0474] Another approach to oral (and pulmonary) delivery would fuse microproteins to Fc-receptors and use the neonatal Fc receptor-mediated uptake from the intestine and transfer to the blood by transcytosis (Low, S C et al. (2005)

[0475] Oral and pulmonary delivery of FSH-Fc fusion proteins via neonatal Fc receptor-mediated transcytosis. Human Reproduction (in press).

[0476] Intracellular delivery of microproteins: Rothbard et al. have demonstrated that natural arginine-rich peptides such as HIV-tat are able to be transported across the cell membrane and that synthetic arg-rich peptides also do this. One approach to mimic this is to append an arg-rich peptide to the N- or C-terminus of the microprotein and the second approach is to increase the arginine content of the microprotein during the design of the library and to favor clones with high arg content during screening. The arginine content can be increased up to about 3%, preferably even 5%, often even 7.5%, sometimes-10% but ideally even 15, 20, 25, 30 or 35%.

[0477] Multimeric Formats: Microproteins can be multimerized for a variety of reasons including increased avidity and increased halflife. We have focused on formats where the domains are separated by a long hydrophilic spacer that is rich in glycine, but one can polymerize domains without spacers or with naturally occurring spacers.

[0478] The long glycine-rich sequence has a large hydrodynamic radius and thus mimics halflife extension by PEGylation. Each glycine-rich sequence spacer can be 20, 25, 30, 35, 40, 50, 60, 70, 80, 100, 120, 140, 160, 180, 200, 240, 280, 320 amino acids long or even longer. For homo-multimeric targets and cell-surface targets, but even for monomeric targets, it is useful to multimerize the microprotein binding site, with glycine-rich spacers located between the binding sites and (optionally) also at the N- and C-terminus. In such proteins the overall length of the glycine polymer in a protein may reach 100, 150, 200, 250, 300, 350, or even 400 amino acids. Such proteins can contain multiple different binding sites, each binding to a different site on the same target (same copy or different copies). In this way it is possible, for example, to create a protein with very long halflife which is partially due to its length and radius and partially due to the presence of (microprotein) binding sites for serum albumin or immunoglobulins or other serum-exposed proteins.

[0479] Antibodies also utilize both size and receptor binding to obtain their long halflife and both mechanisms are likely required for maximal halflife. There are a variety of methods and compositions to achieve such a polymer of binding and non-binding elements: 1) Multiple copies of the binding motif combined in a single protein chain (genetic fusion); copies can be same or different; 2) Single (or multiple) copies of a binding site are expressed as separate proteins and multimerized N-to-C-terminus by chemical coupling. Various chemical coupling methods can be used (see list of coupling agents at www.pierce.com); copies can be same or different; 3) Multiple copies of a binding site in a single protein chain, but separated by non-binding linkers; 4) The binding site and non-binding linker are each expressed as separate proteins and multimerized by chemical coupling. Various chemical coupling methods can be used (add Pierce list of coupling agents); copies can be same or different; 5) Each protein contains one binding site and one non-binding linker and these proteins are multimerized by chemical coupling. Various chemical coupling methods can be used (see wvw.pierce.com); copies can be same or different; 6) Each protein contains a binding site and, optionally, a non-binding linker' each protein has an ‘association peptide’ at both N- and C-terminus, which bind to each other to create directional linear multimers of the protein. Various peptide sequences can be used, such as SKVILF(E) or RARADADARARADADA and derivatives; copies can be same or different. SKVILF(E) homodimerizes in an antiparallel fashion (Bodenmuller et al (1986) EMBO J.), and RARARA (or [RA]n) which binds to DADADA (or [DA]n), which is derived from the RARADADARARADADA peptide reported by Narmoneve, D A et al., (2005) Self-assembling short oligopeptides and the promotion of angiogenesis. Biomaterials 26:4837-4846. Placing the [RA]ₙ polymer at one end and the [DA]ₙ polymer at the other end (C- or N-terminus) of a domain or domain multimer will create a linear, directional polymer via association of the N-terminus of one protein to the C-terminus of another copy of the same protein. If the polymers can be made so long, or crosslinked, such that they do not leave the subcutaneous injection site efficiently, then a depot or slow release formulation may be achieved. One approach is to design protease cleavage sites for serum proteases into the polymer, which will decay slowly.

[0480] Pharmaceutical Targets: The subject microproteins generally exhibit specific binding specificity towards a given target. In some embodiments, the subject microproteins are capable of binding to one target selected from the following non-limiting list: VEGF, VEGF-R1, VEGF-R2, VEGF-R3, Her-1, Her-2, Her-3, EGF-1, EGF-2, EGF-3, Alpha3, cMet, ICOS, CD40L, LFA-1, c-Met, ICOS, LFA-1, IL-6, B7.1, B7.2, OX40, IL-1b,. TACI, IgE, BAFF or BLys, TPO-R, CD19, CD20, CD22, CD33, CD28, IL-1-R1, TNFα, TRAIL-R1, Complement Receptor 1, FGFa, Osteopontin, Vitronectin, Ephrin A1-A5, Ephrin B1-B3, alpha-2-macroglobulin, CCL1, CCL2, CCL3, CCL4, CCL5, CCL6, CCL7, CXCL8, CXCL9, CXCL10, CXCL11, CXCL12, CCL13, CCL14, CCL15, CXCL16, CCL16, CCL17, CCL18, CCL19, CCL20, CCL21, CCL22, PDGF, TGFb, GMCSF, SCF, p40 (IL12/IL23), IL1b, IL1a, IL1ra, IL2, IL3, IL4, IL5, IL6, IL8, IL10, IL12, IL15, Fas, FasL, Flt3 ligand, 41BB, ACE, ACE-2, KGF, FGF-7, SCF, Netrin1,2, IFNa,b,g, Caspase-2,3,7,8,10, ADAM S1,S5,8,9,15,TS1,TS5; Adiponectin, ALCAM, ALK-1, APRIL, Annexin V, Angiogenin, Amphiregulin, Angiopoietin1,2,4, Bc1-2, BAK, BCAM, BDNF, bNGF, bECGF, BMP2,3,4,5,6,7,8; CRP, Cadherin-6,8,11; Cathepsin A,B,C,D,E,L,S,V,X; CD11a/LFA-1, LFA-3, GP2b3a, GH receptor, RSV F protein, IL-23 (p40, p19), IL-12, CD80, CD86, CD28, CTLA-4, α4β1, α4β7, TNF/Lymphotoxin, VEGF, IgE, CD3, CD20, IL-6, IL-6R, BLYS/BAFF, IL-2R, HER2, EGFR, CD33, CD52, Digoxin, Rho (D), Varicella, Hepatitis, CMV, Tetanus, Vaccinia, Antivenom, Botulinum, Trail-R1, Trail-R2, cMet, TNF-R family, such as LA NGF-R, CD27, CD30, CD40, CD95, Lymphotoxin a/b receptor, Wsl-1, TL1A/TNFSF15, BAFF-R/TNFRSF13C, TRAIL R2/TNFRSF10B, TRAIL R2/TNFRSF10B, Fas/TNFRSF6 CD27/TNFRSF7, DR3/TNFRSF25, HVEM/TNFRSF14, TROY/TNFRSF19, CD40 Ligand/TNFSF5, BCMA/TNFRSF17, CD30/TNFRSF8, LIGHT/TNFSF14, 4-1BB/TNFRSF9, CD40/TNFRSF5, GITR/TNFRSF18, Osteoprotegerin/TNFRSF11B, RANK/TNFRSF11A, TRAIL R3/TNFRSF10C, TRAIL/TNFSF10, TRANCE/RANK L/TNFSF11, 4-1BB Ligand/TNFSF9, TWEAK/TNFSF12, CD40 Ligand/TNFSF5, Fas Ligand/TNFSF6, RELT/TNFRSF19L, APRIL/TNFSF13, DcR3/TNFRSF6B, TNF RITNFRSF1A, TRAIL R1/TIFRSF10A, TRAIL R4/TNFRSF10D, CD30 Ligand/TNFSF8, GITR Ligand/TNFSF18.

[0481] GITR Ligand/TNFSF18, TACI/TNFRSF13B, NGF R/TNFRSF16, OX40 Ligand/TNFSF4, TRAIL R2/TNFRSF10B, TRAIL R3/TNFRSF10C, TWEAK R/TNFRSF12, BAFF/BLyS/TNFSF13, DR6/TIFRSF21, TNF-alpha/TNFSF1A, Pro-TNF-alpha/TNFSF1A, Lymphotoxin beta R/TNFRSF3, Lymphotoxin beta R (LTbR)/Fc Chimera, TNF RI/fRSF1A, TNF-beta TNFSF1B, PGRP-S, TNF RVTNFRSF1A, TNF RII/TNFRSF1B, EDA-A2, TNF-alpha/TNFSF1A, EDAR, XEDAR, TNF RIVTNFRSF1A.

[0482] The following Examples are intended to illustrate and not limit the invention by providing methods for making materials useful in the methods of the present invention and operative embodiments of the methods of the invention.

### EXAMPLES

### Example 1

### Randomization of CDP 6_{—}6_{—}12_{—}3_{—}2

[0483] The following example describes the design of a library based on the CDP 6_{—}6_{—}12_{—}3_{—}2. The TrEMBL data base of protein sequences was searched for partial sequences that matched the CDP 6_{—}6_{—}12_{—}3_{—}2. A total of 71 sequences matched the CDP. The amino acid prevalence was calculated for each position as shown in Table 5. For each non-cysteine position, we chose a randomization scheme based on the following criteria: a) avoid the introduction of stop codons, b) avoid the introduction of extra cysteine residues, c) allow a large number of the amino acids that were observed at >3% in the particular position, d) minimize the introduction of amino acids that have not been observed in any of the 71 natural sequences that match the CDP.

TABLE 5
Amino acid composition of CDP 6_6_12_3_2 and resulting library design.

| position | A | C | D | E | F | G | H | I | K | L | M | N | P | Q | R | S | T |
|---|---|---|---|---|---|---|---|---|---|---|---|---|---|---|---|---|---|
| 1 | 0 | 100 | 0 | 0 | 0 | 0 | 0 | 0 | 0 | 0 | 0 | 0 | 0 | 0 | 0 | 0 | 0 |
| 2 | 0 | 0 | 0 | 6 | 4 | 0 | 1 | 10 | 4 | 0 | 0 | 0 | 0 | 4 | 3 | 1 | 7 |
| 3 | 0 | 0 | 100 | 0 | 0 | 0 | 0 | 0 | 0 | 0 | 0 | 0 | 0 | 0 | 0 | 0 | 0 |
| 4 | 45 | 0 | 6 | 6 | 0 | 6 | 1 | 3 | 1 | 7 | 3 | 1 | 0 | 0 | 6 | 7 | 7 |
| 5 | 31 | 0 | 0 | 0 | 1 | 0 | 0 | 11 | 0 | 4 | 0 | 0 | 0 | 0 | 0 | 4 | 4 |
| 6 | 4 | 0 | 6 | 1 | 0 | 0 | 0 | 3 | 4 | 0 | 11 | 18 | 8 | 0 | 0 | 7 | 27 |
| 7 | 1 | 0 | 59 | 4 | 1 | 7 | 0 | 0 | 1 | 1 | 0 | 15 | 0 | 1 | 1 | 1 | 0 |
| 8 | 0 | 100 | 0 | 0 | 0 | 0 | 0 | 0 | 0 | 0 | 0 | 0 | 0 | 0 | 0 | 0 | 0 |
| 9 | 46 | 0 | 6 | 6 | 0 | 13 | 0 | 0 | 0 | 0 | 0 | 3 | 4 | 7 | 6 | 6 | 1 |
| 10 | 0 | 0 | 4 | 3 | 0 | 0 | 1 | 1 | 1 | 4 | 0 | 54 | 0 | 8 | 8 | 3 | 7 |
| 11 | 0 | 0 | 52 | 0 | 11 | 0 | 1 | 3 | 0 | 6 | 1 | 6 | 0 | 0 | 6 | 0 | 3 |
| 12 | 10 | 0 | 0 | 0 | 0 | 0 | 0 | 23 | 8 | 17 | 6 | 0 | 3 | 1 | 13 | 0 | 10 |
| 13 | 3 | 0 | 6 | 1 | 0 | 1 | 1 | 0 | 3 | 0 | 0 | 4 | 6 | 3 | 1 | 65 | 6 |
| 14 | 1 | 0 | 0 | 0 | 4 | 0 | 0 | 54 | 0 | 20 | 1 | 0 | 0 | 0 | 4 | 3 | 3 |
| 15 | 0 | 100 | 0 | 0 | 0 | 0 | 0 | 0 | 0 | 0 | 0 | 0 | 0 | 0 | 0 | 0 | 0 |
| 16 | 0 | 0 | 1 | 1 | 7 | 6 | 0 | 0 | 3 | 6 | 1 | 30 | 0 | 21 | 1 | 4 | 17 |
| 17 | 17 | 0 | 10 | 3 | 0 | 4 | 8 | 0 | 1 | 0 | 3 | 18 | 0 | 0 | 6 | 11 | 11 |
| 18 | 3 | 0 | 0 | 4 | 1 | 0 | 0 | 14 | 6 | 0 | 0 | 1 | 17 | 7 | 1 | 4 | 0 |
| 19 | 11 | 0 | 3 | 1 | 4 | 49 | 0 | 0 | 4 | 0 | 1 | 1 | 7 | 0 | 3 | 3 | 10 |
| 20 | 0 | 0 | 1 | 0 | 8 | 0 | 0 | 1 | 0 | 10 | 44 | 0 | 0 | 0 | 0 | 0 | 0 |
| 21 | 1 | 0 | 0 | 7 | 3 | 0 | 0 | 0 | 10 | 0 | 0 | 0 | 0 | 62 | 0 | 11 | 1 |
| 22 | 3 | 0 | 32 | 11 | 1 | 0 | 0 | 0 | 1 | 0 | 0 | 1 | 14 | 3 | 10 | 6 | 15 |
| 23 | 6 | 0 | 0 | 0 | 54 | 0 | 0 | 4 | 0 | 7 | 6 | 0 | 0 | 0 | 0 | 1 | 6 |
| 24 | 0 | 0 | 0 | 0 | 3 | 0 | 0 | 6 | 0 | 11 | 27 | 0 | 0 | 0 | 0 | 0 | 0 |
| 25 | 8 | 0 | 0 | 3 | 0 | 0 | 1 | 3 | 8 | 1 | 3 | 51 | 0 | 7 | 10 | 4 | 0 |
| 26 | 3 | 0 | 0 | 6 | 0 | 6 | 0 | 0 | 6 | 14 | 0 | 4 | 0 | 23 | 4 | 17 | 18 |
| 27 | 0 | 0 | 3 | 0 | 1 | 0 | 3 | 3 | 4 | 3 | 0 | 21 | 0 | 4 | 18 | 0 | 0 |
| 28 | 0 | 100 | 0 | 0 | 0 | 0 | 0 | 0 | 0 | 0 | 0 | 0 | 0 | 0 | 0 | 0 | 0 |
| 29 | 14 | 0 | 0 | 1 | 0 | 0 | 0 | 0 | 4 | 0 | 0 | 0 | 14 | 49 | 13 | 3 | 1 |
| 30 | 1 | 0 | 0 | 1 | 1 | 0 | 0 | 0 | 42 | 11 | 0 | 0 | 0 | 1 | 41 | 0 | 0 |
| 31 | 3 | 0 | 0 | 0 | 0 | 0 | 0 | 0 | 0 | 0 | 0 | 0 | 0 | 0 | 0 | 6 | 92 |
| 32 | 0 | 100 | 0 | 0 | 0 | 0 | 0 | 0 | 0 | 0 | 0 | 0 | 0 | 0 | 0 | 0 | 0 |
| 33 | 6 | 0 | 7 | 3 | 0 | 41 | 0 | 0 | 10 | 0 | 0 | 20 | 0 | 4 | 0 | 10 | 0 |
| 34 | 0 | 0 | 0 | 0 | 20 | 0 | 4 | 7 | 4 | 6 | 0 | 0 | 0 | 0 | 54 | 1 | 0 |
| 35 | 0 | 100 | 0 | 0 | 0 | 0 | 0 | 0 | 0 | 0 | 0 | 0 | 0 | 0 | 0 | 0 | 0 |

| position | V | W | library 1 | nucleotide 1 | nucleotide 2 | nucleotide 3 |
|---|---|---|---|---|---|---|
| 1 | 0 | 0 | C | T | G | T |
| 2 | 56 | 0 | VAEMTK | AG | TCA | G |
| 3 | 0 | 0 | F | T | T | C |
| 4 | 1 | 0 | VAITLPFS | TCAG | TC | T |
| 5 | 41 | 0 | VAEMTK | AG | TCA | G |
| 6 | 10 | 0 | LPHQRIMTNKSVADEG | CAG | TCAG | CG |
| 7 | 1 | 0 | DN | AG | A | C |
| 8 | 0 | 0 | C | T | G | C |
| 9 | 0 | 3 | PHQRADEG | CG | CAG | TA |
| 10 | 3 | 1 | NSKRHQ | CA | AG | CG |
| 11 | 3 | 1 | DVFY | TG | TA | T |
| 12 | 10 | 0 | LPHQRIMTNKSR | CA | TCAG | TCAG |
| 13 | 0 | 0 | SNT | A | CAG | T |
| 14 | 4 | 0 | FILV | TCAG | T | T |
| 15 | 0 | 0 | C | T | G | C |
| 16 | 0 | 0 | PHQRTNKS | CA | TAG | TCAG |
| 17 | 7 | 0 | PHQRTNKSADEG | CAG | CAG | TCAG |
| 18 | 41 | 0 | LPQVAE | CG | TCA | A |
| 19 | 1 | 0 | TSRAG | AG | CG | TCAG |
| 20 | 0 | 4 | FYLH | TC | TA | T |
| 21 | 3 | 0 | QKE | CAG | A | G |
| 22 | 1 | 0 | TNKSRADEG | AG | CAG | CG |
| 23 | 17 | 0 | FLVM | TCAG | T | G |
| 24 | 54 | 0 | VLIM | CAG | T | CG |
| 25 | 0 | 0 | NSKRHQ | CA | AG | TA |
| 26 | 0 | 0 | LPHQRIMTNKSVADEG | CAG | TCAG | CG |
| 27 | 0 | 0 | YHN | TCA | A | C |
| 28 | 0 | 0 | C | T | G | T |
| 29 | 0 | 0 | PQRAEG | CG | CAG | G |
| 30 | 0 | 0 | KR | A | AG | G |
| 31 | 0 | 0 | TS | A | A | C |
| 32 | 0 | 0 | C | T | G | T |
| 33 | 0 | 0 | NKSRDEG | AG | AG | CG |
| 34 | 0 | 0 | FYLHIN | TCA | TA | C |
| 35 | 0 | 0 | C | T | G | C |

The last three columns in the table indicate the codon mixture that results in the amino acids that are listed in column labeled “library 1”.

### Example 2

### Protein Expression and Folding in E. coli

[0484] The oligonucleotides are cloned into an expression plasmid vector which drives expression of the proteins in the cytoplasm of E. coli. The preferred promoter is T7 (Novagen pET vector series; Kan marker) in E. coli strain BL21 DE3. A preferred process for inserting these oligos is the modified Kunkel approach (Scholle, D., Kehoe, J W and Kay, B. K. (2005) Efficient construction of a large collection of phage-displayed combinatorial peptide libraries. Comb. Chem. & HTP Screening 8:545-551). A different approach is a 2-oligo PCR of the (whole or partial) vector followed by digestion of the unique restriction sites in the oligo-derived ends of the fragment, followed by ligation of the compatible, non-palindromic overhangs (efficient intra-fragment ligation). A third approach is assembly of the insert from 2 or 4 oligos by overlap PCR, digestion of the restriction enzyme sites at the ends of the assembled insert, followed by ligation into the digested vector. The ligated DNA is transformed into competent E. coli cells and after plating on LB-Kan plates and overnight growth individual colonies are picked and inoculated into 96-well plates with 2xYT media and the cultures are grown in a shaker at 37 C overnight.

[0485] The plates are heated to 80 C for 20 min and centrifuged at 6000 g to pellet the aggregated E. coli proteins.

### Example 3

### Design Steps for Antifreeze Protein

[0486] Objective: Design a library for an antifreeze repeat protein

[0487] Strategy: The starting sequence for library design is derived from an antifreeze protein from Tenebrio molitor (Genbank accession number AF160494). This protein is known to express well in Escherichia coli. Both crystal and

[0488] NMR structures are available. The protein is built from repeating units that form a cylindrical shape. The core of the structure lacks hydrophobic amino acids, but contains one disulfide bond per repeat and one invariant serine and alanine residue. The first two turns form a capping motif with three disulfide bonds. It is assumed that this capping motif forms a folding nucleus. Therefore, the first two repeats are typically kept unchanged during in vitro evolution. See FIG. 127.

[0489] In order to choose the cross-over points and to find positions for glutamine residues for Scholle mutagenesis, the structural features of antifreeze protein were analyzed.

[0490] Crossoverpoints are shown in red and were chosen to preserve the beta-sheet stack found in the structure. Thus, two loops on the opposite side of the beta stack can be mutagenized per library. Loops in the end cap can be mutagenized at a later stage using a general upstream priming site located outside the antifreeze open reading frame. In order to choose codons for mutagenesis, an alignment of 215 repeat units was downloaded from the Pfam webpage describing antifreeze protein families (PF02420 in Pfam database). The text file was analyzed using the program Profile analyzer v1.0 with settings “2,8” for cysteine positions and “12” for total length of repeat. This setting excludes the N-terminal repeat units, which contain three cysteines per 1 amino acid repeat. Consequently, the program rejects 89 sequences and analyzes the remaining 126 sequences showing the conservation and occurrence of each amino acid in the antifreeze repeat. The output was pasted into an Excel spreadsheet and used as a starting point for library design.

### Example 4

### Design Steps for Three-Finger Toxin (Erabutoxin)

[0491] Objective: Design libraries using the Three Finger Toxin scaffold

[0492] Background: Three finger toxin exhibits a unique structure with a four-disulfide core and three long loops protruding from this core. These loops are known to participate in various protein-protein interactions and can be targeted by directed evolution.

[0493] Methods: The most common cysteine spacing patterns are 10-6-16-3-10-0-4, 13-6-16-1-10-0-4 and 13-5-16-1-10-0-4. The Erabutoxin sequence TRICFNHQSSQPQTTKTCSPGESSCYNKQWSDFRGTIIERGCGCPTVKPGIKLSCCESEVCNNA is chosen as a starting sequence and falls into the 13-6-16-1-10-0-4 pattern. This sequence was chosen because it can be expressed in Escherichia coli.

[0494] Two cross-over points were chosen to allow a maximal number of mutations in the loop regions.

### Example 5

### Design Steps for Plexin

[0495] Objective: Design a library utilizing the Plexin or PSI scaffold.

[0496] Advantages of this scaffold: This scaffold offers the unique advantage to introduce length variation between individual cysteine residues. A remarkable variation in length between cysteines of the PSI fold is found in nature and therefore supports this design principle. The diversity in loop length ranks among the highest in the microprotein family. FIG. 135 shows the ‘Multi-Plexins’ that can be created by gradual length increase by the addition of AA residues.

[0497] Strategy: The Pfam database lists 468 family members. The cysteine spacing between Cys5/Cys6, Cys6/Cys7 and Cys7/8 is highly variable. It is therefore difficult to choose a starting consensus sequence. The NMR structure of the PSI domain of the Met receptor has been solved and shows a pattern of 5,2,8,2,3,5,9. This protein has been expressed in Escherichia coli, albeit at rather low levels (1 mg/9 liter of cells). The database was searched for members displaying 5,2,8,2 spacing and 99 sequences were found. However, only 11% of these have the motif 5,2,8,2,3, and only three members possess 5,2,8,2,3,5,9. Therefore, this spacing pattern was ignored and the most common spacing pattern for this family was determined. A search with 5,2,7,2,5 yields 54 sequences. These patterns are aligned in an Excel spreadsheet to derive the most common codons at each position. The last spacing is the most variable, even insertions of whole protein domains are found. The most common spacing at the last position of the 54 members with 5, 2,7,2,5 is “15”. In summary, the consensus sequence for the PSI fold was derived from family members with the pattern 5,2,7,2,5,15.

[0498] Structure “1 ss1” shows the PSI domain from the Met receptor. The cross-over points were designed to keep the most conserved family motif, CGWC, intact. This allows randomization of the first half of the scaffold. A second cross-over-point was inserted at Cys7. This allows one to maximize the randomization of cysteine spacings 5,6 and 7, which show great length variation in nature. See FIG. 119.

[0499] FIG. 120: Alignment of library consensus with consensus 5,2,8,2,3,5 (only 11 members) shows 25% identity. The greatest diversity is in the last cys spacing, which is consistent with logo and comparison with other members.

### Example 6

### Design Steps for Somatomedin

[0500] Objective: Design a library utilizing the somatomedin scaffold

[0501] Strategy: The consensus EESCKGRCGEGFNRGKECQCDELCKYYQSCCPDYESVCKPK was derived from 44 sequences with identical cysteine spacing pattern.

[0502] The cross-overpoint was chosen approximately in the middle of the protein to allow mutagenesis in the two halves of the sequence. See FIG. 121.

### Example 7

### Evaluation of Microprotein Scaffold Expression

[0503] Microprotein open reading frames for antifreeze protein (AF), three-finger toxin (TF), somatomedin (SM) and plexin (PL) were cloned into a pET30-derived vector and expressed in Escherichia coli strain BL21(DE3). Overnight cultures were diluted 1:200 into 20 ml LB, and grown for 3 hrs and then induced with 2 mM IPTG, and grown for an additional 4 hrs. Cultures were spun at 5000×g for 10 minutes and resuspended in PBS. 250 μl of the samples were heated to 80 degree C. for 30 min and spun at RT for 10 min. Supernatants from the heat step (50 μl sample) were mixed with 25 μl sample buffer with 5% BME; resuspended cells (50 A1) were directly mixed with 25 A1 sample buffer with 5% BME. The samples were boiled for 10 minutes and then loaded on 16% SDS-PAGE.

[0504] Results: See FIG. 122. From left to right (16% SDS-PAGE): Partially purified proteins: Positive control, new AF scaffold, new TF scaffold, new SM scaffold, PL(short version), control, NEB broad range, then same order for whole cell preps of the same proteins.

[0505] Conclusions: Proteins TF, SM, PL are present in the supernatant at high concentration and are highly heat-resistant.

### Example 8

### Construction of Phagemid Vector pMP0003

[0506] We constructed a vector for the efficient construction of microprotein libraries. The vector background is based on pBluescript phagemid vector. We inserted an expression cassette that is driven by a lacZ promoter. The coding sequence comprises the following elements: ompA signal peptide, short stuffer sequence that is flanked SfiI and BstXI sites, linker element, hexahistidine tag, hemagglutinin (HA) tag, amber stop codon, C-terminal fragment of pIII protein of M13 phage, stop codon. The stuffer sequence is only 40 bp long. It contains dual TAA and TGA stop codons and a unique BssHII site. The construction of large phagemid libraries is frequently limited by the availability of sufficient quantities of digested purified vector fragment. The design of pMP0003 greatly facilitates the preparation step as it avoids the need to purify vector fragment by preparative agarose gel electrophoresis. A triple digest of plasmid pMP0003 with SfiI, BstXI, and BssHII releases two very short stuffer fragments 19 and 21 bp long, which can be removed by ultrafiltration using a YM-100 column (Microcon). The presence of the BssHII site in the stuffer also leads to a significant reduction in the frequency of non-recombinant clones in libraries that are based on pMP0003.

### Example 9

### Design and Construction of Library LMB0020

[0507] Libraries of random clones can be constructed based on many microprotein sequences. The process comprises several steps: 1) identify a suitable microprotein scaffold, 2) identify residues for randomization, 3) chose a randomization scheme for each randomized position, 4) design partially random oligonucleotides that encode the microprotein scaffold and that incorporate nucleotide mixtures in particular positions according to the randomization scheme, 5) assemble the microprotein fragment, 6) restriction digest and purification, 7) ligate the fragment into digested vector fragment, 7) transformation into competent cells.

[0508] Library LMB0020 is based on the sequence of the trypsin inhibitor EETI-II, which is a member of the squash family protease inhibitors (Christmann, A., et al. (1999) Protein Eng, 12: 797-806). The crystal structure of EETI-II was inspected and 10 positions were chosen for randomization. 9 positions were randomized using the random codon NHK, which allows the introduction of 16 amino acids (A, D, E, F, H, I, K, L, M, N, P, Q, S, T, V, Y). In one position the random codon VNK was used that allows 16 amino acids (A, D, E, F, H, I, K, L, M, N, P, Q, S, T, V, Y). The resulting random sequence is: GCPXXXXXCKQDSDCXXGCVCZPXGXCGSP where X represents the codon NHK and Z represents the codon VNK. This randomization scheme allows for a theoretical diversity of over 10¹² different amino acid sequences. The gene fragment encoding the randomized trypsin inhibitor was assembled by overlap extension of two oligonucleotides with the sequence:

LMB0020F = CAGGCAGCGGGCCCGTCTGGCCCGGGTTGTCCTNHKNHK
NHKNHKNHKTGTAAACAAGACTCTGACTG,
LMB0020R = TGTAAACAAGACTCTGACTGTNHKNHKGGTTGCGTTTGC
VNKCCGNHKGGTNHKTGTGGCTCTCCGGGCCAGTCTGGTGGTTCCGGTCA
CGTGACCGGAACCACCAGACTGGCCCGGAGAGCCACAMDNACCMDNCGGM
NBGCAAACGCAACCMDNMDNACAGTCAGAGTCTTGTTTACA.

[0509] The oligonucleotides LMB0020F and LMB0020R share a complementary region of 20 nucleotides. Two steps PCR amplification was performed by annealing of two complementary primers followed by filling in reaction. The product was then amplified by using scaffold primers LIBPTF and LIBPTR, which contain the restriction sites.

[0510] The resulting product was concentrated using a YM-30 filter (Microcon) and purified by preparative agarose gel electrophoresis using 1.2% agarose.

[0511] Ten pg of product were SfiI/BstXI digested for 5 h at 50° C. and quick purified on PCR column (Qiagen) yielding ca 4 μg of purified fragment. The vector pMP0003 was prepared using QIAGEN HiSpeed Maxi Kit. 150 μg of vector DNA were SfiI/BstXI/BssHII digested for 4 h at 50° C. in 3 separate Eppendorf tubes and purified on YM-100 column (Microcon). Total yield was 112.5 μg (75%) of digested vector. Various insert to vector ratios were tested in small scale experiments to maximize the number of transformants in the library. Large scale ligations were performed in 7 ligation tubes. Each tube contains 3 μg of digested vector, 0.5 μg of digested insert (1:2.5 ratio), 40 μl of ligase buffer, 20 μl of T4 DNA ligase in 400 μl of total volume. Ligation was performed overnight at 16° C. The resulting product was purified by ethanol precipitation overnight at −20° C. in 8 tubes for each library. The ligated DNA in each tube was dissolved in 30 ml of distilled water and divided on 2×15 μl, thus yielding 16 tubes for transformation per library.

[0512] Electrocompetent E. coli ER2738 were prepared using the following process: 1) Inoculate 15 ml of prewarmed superbroth medium (SB) in a 50-ml polypropylene tube with a single E. coli colony from a glycerol stock that has been freshly streaked onto an LB agar (5 mg/l tetracycline). Add tetracycline to 30 μg/ml (90 μl of 5 mg/ml tetracycline) and grow overnight at 250 rpm on a shaker at 37° C. 2)Dilute 2.5 ml of the culture into each of four 2-liter flasks with 500 ml of SB medium, add 10 ml of 20% glucose, 5 ml of 1M MgCl₂, and 500 μl of 5 mg/ml tetracycline. Shake at 250 rpm and 37° C. until absorbance at 600 nm is about 0.9 (2 h 45 min). 3) Chill the culture as well as 4 500-ml bottles on ice for 15 min. 4) Transfer the culture into 4 500-ml bottles and spin at 4000 rpm for 20 min at 4° C. 5) Pour off the super and resuspend each pellet in 25 ml of pre-chilled 10% glycerol using 25-ml pre-chilled pipettes. Combine 2 pellets in one 250-ml bottle and add 10% glycerol to yield 250 ml. Spin as before. 6) Pour off the supernatant and repeat step 5. 7) Discard the supernatant and resuspend each pellet in the remaining volume (3.5 ml). Combine all suspensions. Use 300 μl aliquot for library electroporation. Optional: To store, aliquot 320 μl in eppendorf tubes and flash freeze them using ethanol and dry ice. Cap the tubes and store them at −80° C. 8) Plate 50 μl of cell suspension on LB argar (100 mg/l carbenicillin) to test for vector phage contamination. Plate 50 μl of cell suspension on LB argar (50 mg/l kanamycin) to test for helper phage contamination.

[0513] Electroporation of the library was performed using the following steps: 1) Place the ligated DNA (usually 16) and a corresponding number of cuvettes on ice for 10 min. 2) Add freshly prepared ER2738 cells to each ligated library sample, mix by pipeting up and down once, and transfer to a cuvette. Store on ice for 1 min. Electroporate at 2.5 kV, 25 μF, and 200 ohm. Flush the cuvette immediately with 2 ml and then with 1 ml SOC medium at room temperature. Combine 3 ml of culture in 10-ml culture tube. Shake at 300 rpm for 1 hr at 37° C. 3) Combine two 3 ml samples and transfer to 50-ml polypropylene tube. Add 9 ml of pre-warmed (37° C.) SB medium, 3 μl of 100 mg/ml carbenicillin, and μl of 5 mg/ml tetracycline. For titering of transformed bacteria, dilute 2 μl of the culture in 200 μl of SB medium, and plate 10 μl and 1 μl of this 1:100 dilution on LB agar (100 mg/l carbenicillin). Incubate the plates overnight at 37° C. Calculate the total number of transformants by counting the number of colonies, multiplying by the culture volume, and dividing by the plating volume. Shake the 15-ml culture at 300 rpm and 37° C. for 1 h, add 4.5 μl 100 mg/ml carbenicillin, and shake for an additional hour at 300 rpm and 37° C. 4) Combine two 15 ml samples and add 3 ml of VCSM13 helper phage. Transfer to a 500-ml polypropylene centrifuge bottle. Add 167 ml of pre-warmed (37° C.) SB medium, 92.5 μl of 100 mg/ml carbenicillin, and 185 μl of 5 mg/ml tetracycline. Shake the 200-ml culture at 300 rpm and 37° C. for 1.5-2 h. 5) Add 280 μl of 50 mg/ml kanamycin and continue shaking at 300 rpm and 37° C. overnight. 6)

[0514] Spin at 4000 rpm for 15 min at 4° C. Transfer the supernatant to a clean 500-ml centrifuge bottle and add 50 ml of 20% PEG-8000/NaCl 2.5M. Store on ice for 30 min. 7) Spin at 9000 rpm for 15 min at 4° C. Discard the supernatant, drain liquid by inverting centrifuge bottles on a paper towel for at least 10 min, and wipe off remaining liquid from the upper part of the centrifuge bottles with a paper towel. 8) Resuspend the phage pellet in 2 ml of 1% (w/v) bovine serum albumin (BSA) in Tris buffered saline (TBS) buffer by pipetting up and down along the side of the centrifuge bottle and transfer to a 2-ml microcentrifuge tube. Resuspend further by pipetting up and down using a 1-ml pipette tip, spin at full speed in a microcentrifuge for 5 min at 4° C., and pass the supernatant through a 0.2-μm filter into a sterile 2-ml microcentrifage tube. Store the phage preparation at 4° C. Sodium azide may be added to 0.02% (w/v) for long-term storage. The resulting library size for LMB0020 was 2.4×10⁹ transformants.

### Example 10

### Panning of Library LMB0020

[0515] 1) Coat wells of a Costar 96-well ELISA plate with 0.25 μg of CD22 antigen in 25 μl of PBS. Cover the plate with plate sealer. Coating can be performed overnight at 4° C. or for 1 h at 37° C. In the first round of panning coat 2 wells per library to be screened; one well is sufficient in each of the subsequent rounds. The target concentration was lowered to 0.1 ug/well during panning rounds 3 to 6.

[0516] 2) After shaking out the coating solution, block the well by adding 150 μl of TBS/BSA 3% (Tris buffered saline containing 3% bovine serum albumin). Seal and incubate for 1 h at 37° C.

[0517] 3) After shaking out the blocking solution, add 50 μl of freshly prepared phage library to the well (Input sample). Seal the plate and incubate for 2 h at 37° C. In the meantime, inoculate 2 ml SB medium plus 2 μl of 5 mg/ml Tetracycline with 2 μl of an ER 2738 cell preparation and allow growth at 250 rpm and 37° C. for 2.5 h. Grow 1 culture for each library that is screened and an additional culture for input titering.

[0518] 4) Shake out the phage solution, add 150 μl of TBS/Tween-20 0.05% to the well and pipette 5 times vigorously up and down. Wait 5 min, shake out, and repeat this washing step. In the first round of panning, wash in this fashion 4 times, in the second round 6 times, in the third round 8 times, and so on.

[0519] 5) After shaking out the final washing solution, add 50 μl of freshly prepared 10 mg/ml trypsin in TBS, seal, and incubate for 30 min at 37° C. Pipette 10 times vigorously up and down and transfer the eluate (2×50 μl in the first round, 1×50 μl in the subsequent rounds) to the prepared 2-ml E. coli culture and incubate at room temperature for 15 min.

[0520] 6) Add 6 ml of pre-warmed SB medium and 1.6 μl of 100 mg/ml carbenicillin and 6 μl of 5 mg/ml Tetracycline. Transfer the culture into a 50-ml polypropylene tube. For output titering, dilute 2 μl of the sample in 200 μl SB medium and plate 100 μl and 10 μl of this sample on LB agar (100 mg/l carbenicillin) (Output sample). In parallel, proceed with the input titering by infecting 50 μl of the prepared 2-ml E. coli culture with 1 μl of a 10⁻⁸ dilution of the phage preparation, incubate for 15 min at room temperature, and plate on LB agar (100 mg/l carbenicillin).

[0521] 7) Shake the 8-ml culture at 250 rpm and 37° C. for 1 h, add 2.4 μl 100 mg/ml carbenicillin, and shake for an additional hour at 250 rpm and 37° C.

[0522] 8) Add 1 ml of VCSM13 helper phage and transfer to a 500-ml polypropylene centrifuge bottle. Add 91 ml of pre-warmed (37° C.) SB medium and 46 μl of 100 mg/ml carbenicillin and 92 μl of 5 mg/ml Tetracycline. Shake the 100-culture at 300 rpm and 37° C. for 1½ to 2 h.

[0523] 9) Add 140 μl of 50 mg/ml kanamycin and continue shaking at 300 rpm and 37° C. overnight.

[0524] 10) Spin at 4000 rpm for 15 min at 4° C. Transfer the supernatant to a clean 500-ml centrifuge bottle and add add 25 ml of 20% PEG-8000/NaCl 2.5M. Store on ice for 30 min.

[0525] 11) Spin at 9000 rpm for 15 min at 4° C. Discard the supernatant, drain inverted on a paper towel for at least 10 min, and wipe off remaining liquid from the upper part of the centrifuge bottle with a paper towel.

[0526] 12) Resuspend the phage pellet in 2 ml of TBS/BSA 1% buffer by pipetting up and down along the side of the centrifuge bottle and transfer to a 2-ml microcentrifuge tube. Resuspend further by pipetting up and down using a 1-ml pipette tip, spin at full speed in a microcentrifuge for 5 min at 4° C., and pass the supernatant through a 0.2-μm filter into a sterile 2-ml microcentrifuge tube.

[0527] 13) Continue from step 3) for the next round or store the phage preparation at 4° C. Sodium azide may be added to 0.02% (w/v) for long-term storage. Only freshly prepared phage should be used for each round.

[0528] Table 6 shows the phage titer of input and output solutions during 6 rounds of library panning

| | Input | Output | Recovery | |
|---|---|---|---|---|
| Round | (10¹¹) | (10⁶) | (% × 10³) | Enrichment |
| 1 | 12 | 1.9 | 0.16 | — |
| 2 | 0.45 | 0.032 | 0.007 | neg |
| 3 | 4.7 | 2.14 | 0.46 | 2.87 |
| 4 | 2.5 | 0.064 | 0.032 | neg |
| 5 | 0.52 | 1.2 | 2.3 | 14.37 |
| 6 | 0.6 | 2.0 | 3.33 | 20.8 |

### Example 11

### Screening of Individual Isolates for Target Binding

[0529] ER2738 was infected with output phage and plated on LB agar (100 mg/l carbenicillin). Plates were incubated overnight at 37 C. Subsequently, individual colonies can be screened for binding to target protein as follows:

[0530] 1) Add 0.75 ml SB medium containing 50 μg/ml carbenicillin to 96 well plate with deep with deep wells. Transfer individual colonies into each well using a sterile tooth pick. 2) Shake the plate containing the bacterial cultures at 300 rpm for several hours at 37° C.

[0531] 2) Spot 1 μl of each culture onto LB agar (100 mg/l carbenicillin) at 6 hours after inoculation. Incubate plates overnight at 37° C.; seal plates with parafilm and store them at 4° C. These plates were used later to retrieve and sequence isolates that showed positive ELISA signals.

[0532] 3) Induce cultures by adding IPTG to 1 mM (7.5 μl of 1 M IPTG stock diluted 1:10 in water) and culture them overnight at 37 C

[0533] 4) Spin down induced E. coli cultures (4000 rpm; 20 min).

[0534] 5) Prepare Bugbuster solution (Novagen) (1.5 ml reagent plus 13.5 ml TBS and 15 μl of Benzonase).

[0535] 6) Resuspend pellet in 150 μl bugbuster. Incubate plate at room temperature for 30 minutes and spin plate at 4000 rpm for 20 minutes.

[0536] 7) Transfer 50 μl per well of supernatants to microtiter plates that have been coated overnight at 4 C with 100 ng of target protein per well in PBS and blocked with 150 ul/well of TBS containing 3% BSA for one hour.

[0537] 8) Incubate plate for 2 hours at 37° C.

[0538] 9) Wash 10 times with tap water.

[0539] 10) Dilute biotinylated rat anti-HA antibody (3F10, Roche Biosciences) in TBS/BSA 1% (1:500 dilution). Add 50 μl of diluted antibody to wells, and incubate for 1 hour at 37° C.

[0540] 11) Wash 10 times with tap water.

[0541] 12) Dilute Streptavidin/HRP in TBS/BSA 1% (1:2500 dilution) and add 50 ul per well, and incubate for 30 min at 37° C.

[0542] 13) Prepare ABTS solution (2.94 ml of citrate buffer+60 μl ABTS+1 μl H₂O₂).

[0543] 14) Wash plate 10 times with tap water.

[0544] 15) Add 50 μl substrate solution to each well.

[0545] 16) Incubate at RT and read O.D. at 405 nm using an ELISA plate reader after 20 min incubation at room temperature.

[0546] Output from rounds 5 of library LMB0020 as well as from two other microprotein libraries was screened as described above. The table below shows resulting binding data for plates coated with IgG as well as BSA. Several isolates show significantly higher binding signals on plates coated with IgG relative to BSA coated wells.

[chemical structure]

[0547] Three IgG-binding isolates were sequenced. All isolates maintained the spacing between the 6 cysteine residues of the trypsin inhibitor scaffold. All three isolates differ in their amino acid sequence, which demonstrates that the approach can yield multiple binding domains, each of which can serve as a starting point for further optimization.

LMB0020/SMP003S5.B2
GPSGPGCPILYAHCKQDSDCVTGCVCRPLGMCGSPGQSGGSGHHHHHH
LMB0020/SMP003S5.B12
GPSGPGCPSLPTPCKQDSDCDEGCVCKPNGTCGSPGQSGGSGHHHHHH
LMB0020/SMP003S5.C2
GPSGPGCPLYSPVCKQDSDCDNGCVCRPAGPCGSPGQSGGSGHHHHHH

### Example 12

### Build-Up Approach to Microprotein Design

[0548] A 1-disulfide protein (1SS) that binds to VEGF was evolved stepwise into a 2SS microprotein that is more stable to proteases and less immunogenic. FIG. 1 shows the ELISA results of two separate 2SS proteins (‘Clone 2’ and ‘Clone 7’) that were derived from a 1SS phage derived peptide (‘VEGF pept’). All three are specific for VEGF and do not show binding to other proteins such as BSA. M13 without a microprotein also does not bind to VEGF or BSA. This 2SS protein was created by moving the 1SS sequence that determined VEGF binding into a natural 2SS scaffold (alpha-conotoxin). The resulting protein is specific for VEGF and does not bind unrelated proteins, such as bovine serum albumin (BSA). Wild type phage particles (M13) do not exhibit binding to either VEGF or BSA. See FIG. 168.

### Example 13

### Library Construction by Megaprimer Mutagenesis

[0549] The Megaprimer process is a way to combine two (or more) different primers into a single large primer that is incorporated into a plasmid via homology at both of it's ends in a Kunkel-type polymerase extension reaction (except that a stopcodon-replacement can be used to make incorporation highly efficient). The Megaprimer process uses double-stranded or single stranded DNA of 60, 70, 80, 90, 100, 110 or preferably even more than 120 nucleotides or base pairs for introducing or transferring complex pools of DNA and encoded protein sequences. In our examples these pools encode microprotein libraries, but the same process can encode any DNA or protein library. The megaprimer typically comprises a pool of previously selected sequences (‘old library’) as well as a pool of newly randomized sequences (‘new library’). The Megaprimer process thus allows the blind creation of a new library from an old library—without having to sequence the old library.

[0550] Typically a PCR fragment is created from the library area (‘randomized area’) of a previously selected pool of sequences and this fragment is linked (via PCR-overlap) to a synthetic oligo encoding a newly randomized library segment (unselected), creating a dsDNA fragment containing both the new (unselected) and the old (selected) randomized areas. The same end-result can be achieved in a single PCR using primers on both sides of the ‘old library’ area, if one of the primers introduces the new library. This dsDNA PCR fragment is converted into a ssDNA Megaprimer by asymmetric or run-off PCR. The ends of this ssDNA Megaprimer are designed to have about 10-25 bases of sequence homology with the vector, ensuring insertion at the correct location.

[0551] Double stranded megaprimers are generated from two or more PCR fragments and/or synthetic oligonucleotides using overlap PCR and single-stranded DNA can be generated using denatured double-stranded PCR product and/or single-stranded DNA ‘asymmetric PCR’ (‘run-off PCR’). The asymmetric PCR amplifies the single-stranded sequence that complements the single-stranded DNA template. The megaprimer sequence can comprise a single sequence but more typically comprises a library of (for example, microprotein) sequences (as described in FIG. 143). The single-stranded template DNA (vector or phage) can be uridine-containing or it can encode for a suppressible stop codon (TAG, TAA, TGA) that is exchanged for the megaprimer sequence that does not have a stop codon. The annealed megaprimer then primes synthesis of the second strand of DNA by polymerase and ligation of the synthesized strand is used to generate covalently closed circular DNA (ccc-DNA) in the presence of a buffer, DNA polymerase, DNA ligase, and deoxynucleotide triphosphates (dNTPs). The resulting ccc-DNA is transformed into a bacterial cell line for expression of the microprotein as insoluble protein; soluble protein, or as a protein fusion.

[0552] An example of a Megaprimer result is shown in the table below. It shows amino acid sequences of a microprotein that has been mutagenized in the first 15 positions. Conserved residues that match the initial microprotein template are shaded grey. A library of microprotein sequences, including the sequences from FIG. 2 were used as the starting point for the megaprimer synthesis. Two DNA primers were used to create a PCR fragment containing the ‘old library’ area as well as a new library area: i) a primer that anneals upstream of the microprotein, and ii) a primer that contains newly randomized microprotein sequence (‘new library’) that is flanked by a microprotein-specific annealing region and a DNA template annealing region. The microprotein library input was amplified with the two primers using PCR, amplified by asymmetric PCR, and cloned into single-stranded DNA template to generate a secondary microprotein library. The resulting clones (FIG. 2 bottom) revealed microprotein sequences that were randomized in both the first and second halves of the original sequence.

[chemical structure]

[chemical structure]

[chemical structure]

### Example 14

### Production of Microproteins

[0553] Microprotein genes were cloned into expression vector pET30 carrying the T7 promoter and transformed into E. coli strain BL21(DE3). 2 ml LB (50 mg/l kanamycin) were inoculated from frozen glycerol stocks and cultured for 4 hrs at 37 C. 200 μl of these starting cultures was added to 250 ml LB (50 mg/l kanamycin) and incubated without shaking overnight. Next morning, shaker was turned to 250 rpm and cultures were grown for an additional 1 hr. IPTG was then added to 0.5 mM final concentration and proteins were expressed for 6 hrs in a shaking incubator at 37 C. Cultures were centrifuged at 300 rpm for 15 min, resuspended in 5 ml PBS, and heated for 20 minutes at 75 C. This step leads to cell lysis and to the denaturation of most E. coli proteins. The suspension was centrifuged in an SS34 rotor at 10,000 rpm for 30 minutes. Resulting supernatants were loaded onto HiTrap columns (Pharmacia GE) charged with nickel sulfate. Proteins were eluted with imidazole as suggested by the column manufacturer. The resulting protein is >90% pure as judged by SDS PAGE under reducing conditions.

### Example 15

### Determination of Complexity of DBPs

[0554] Complexity is the cumulative disulfide span, which equals the cumulative distance between linked cysteines, measured in amino acids on the protein chain.

[0555] Complexity is a measure of the degree of crosslinking and thus of rigidity of the scaffold, a higher complexity offering higher rigidity. Because rigidity is a predictor of protease resistance, it also is a useful predictor of immunogenicity. A higher complexity predicts reduced protease degradation and lower immunogenicity.
Complexity=(Ca−Cb)+(Cc−Cd)+(Ce−Cf)

| Ca-Cb | Cc-Cd | Ce-Cf | Cg-Ch | Complexity |
|---|---|---|---|---|
| 1 2 | 3 4 | | | 2 |
| 1 3 | 2 4 | | | 4 |
| 1 4 | 2 3 | | | 4 |
| 1 6 | 2 5 | 3 4 | | 9 |
| 1 4 | 2 5 | 3 6 | | 9 |
| 1 6 | 2 4 | 3 5 | | 9 |
| 1 5 | 2 6 | 3 4 | | 9 |
| 1 5 | 2 4 | 3 6 | | 9 |
| 1 4 | 2 6 | 3 5 | | 9 |
| 1 2 | 3 4 | 5 6 | | 3 |
| 1 2 | 3 5 | 4 6 | | 5 |
| 1 2 | 3 6 | 4 5 | | 5 |
| 1 6 | 2 3 | 4 5 | | 7 |
| 1 4 | 2 3 | 5 6 | | 5 |
| 1 5 | 2 3 | 4 6 | | 7 |
| 1 3 | 2 6 | 4 5 | | 7 |
| 1 3 | 2 4 | 5 6 | | 5 |
| 1 3 | 2 5 | 4 6 | | 7 |
| 1 2 | 3 4 | 5 6 | 7 8 | 4 |

### Example 16

### Scaffolds without Repeated Motifs

[0556] Superfamilies of Toxin Families

[0557] 1) uPAR/Ly6/CD59/snake toxin-receptor superfamily. Includes the families: Activin_recp; BAMBI; PLA2_inh; Toxin_{—}1; UPAR_LY6;

[0558] 2) Scorpion toxin-like knottin superfamily includes the families Toxin_{—}2; Toxin_{—}17; Gamma-thionin; Defensin-2; Toxin_{—}3; Toxin_{—}5;

[0559] 3)Defensin/myotoxin-like superfamily includes the families BDS_I_II; Defensin_{—}1; Defensin_beta; Toxin_{—}4;

[0560] 4) Omega toxin-like superfamily includes families Toxin_{—7}; Toxin_{—}30; Toxin_{—}27; Toxin_{—}24; Toxin_{—}21; Toxin_{—}16; Toxin 12; Toxin_{—}11; Omega-toxin; Albumin_I; Toxin_{—}9;

[0561] 5) Conotoxin O-superfamily consists of 3 groups of Conus peptides that belong to the same structural group. These 3 groups differ in their pharmacological properties: the w-conotoxins which inhibit calcium channels, the delta-conotoxins which slow down the inactivation rate of voltage-sensitive sodium channels and the muO-conotoxins block the voltage sensitive sodium currents.

[0562] 6) Conotoxin I-superfamily includes only the Toxin 19 family.

[0563] 7) Conotoxin T-superfamily includes only the Toxin 26 family.

[0564] Individual Toxin Families:

[0565] PF00087: Toxin 1

[0566] Snake Toxin. A family of venomous neurotoxins and cytotoxins. Structure is small, disulfide-rich, nearly all beta sheet. See FIG. 61.

[0567] Cxxxxx(xxxx)xxxCxxxxxxCxxxx(xxx)C(xx)xxxxxxxxCxxxC

[0568] Cxxxxx(xxxx)xxxCxxxxxxCYxkx(wf)(xx)C(xx)xxxxxxxGCxxxC

[0569] PF00451: Toxin 2

[0570] ‘Scorpion toxin short’. Scorpion venoms contain a variety of peptides toxic to mammals, insects and crustaceans. Among these peptides, there is a family of short toxins (30 to 40 residues) inhibiting calcium-activated potassium channels. See FIG. 55. Topology is 1-4 2-6 3-5.

[0571] 1) CxxxxxCxxxCxxxxxxxxxxCxxxxCxC

[0572] 2) CxxxxxCxxxCkxxxxxxxgKCxxxKCxC

[0573] PF00537: Toxin 3

[0574] This family contains both neurotoxins and plant defensins (F. M. Assadi-Porter, et al. (2000) Arch Biochem Biophys, 376: 259-65). The mustard trypsin inhibitor, MTI-2, is plant defensin. It is a potent inhibitor of trypsin. MTI-2 is toxic for Lepidopteran insects. The scorpion toxin (a neurotoxin) binds to sodium channels and inhibits the activation mechanisms of the channels, thereby blocking neuronal transmission. See FIG. 22. Topology is 1-8 2-5 3-6 4-7.

[0575] 1) C(xxx)x(xx)xxxxCxxxCxx(xx)xxCxxxCxx(x)xxxxCxxxxx(xx)xxCxC

[0576] 2) C(xxx) Y(xx)xxxxCxxxCxx(xx)xxCxxxCxx(x)xxGxCxxxxx(xx)xxC(W,Y)C

[0577] PF00706: Toxin 4

[0578] Anemone neurotokins. Sea anemones produce many different neurotoxins with related structure and function. Proteins belonging to this family include the neurotoxins, of which there are several, including calitoxin and anthopleurin. The neurotoxins bind specifically to the sodium channel, thereby delaying its inactivation during signal transduction, resulting in strong stimulation of mammalian cardiac muscle contraction. Calitoxin 1 has been found in neuromuscular preparations of crustaceans, where it increases transmitter release, causing firing of the axons. Three disulphide bonds are present in this protein. This family is a member of the Defensin/myotoxin-like superfamily clan. This clan includes the following Pfam members: BDS_I_II; Defensin_{—}1; Defensin_beta; Toxin_{—}4. Sea anemones produce many different neurotoxins with related structure and function. Proteins belonging to this family include the neurotoxins, of which there are several, including calitoxin and anthopleurin. The neurotoxins bind specifically to the sodium channel, thereby delaying its inactivation during signal transduction, resulting in strong stimulation of mammalian cardiac muscle contraction. Calitoxin 1 has been found in neuromuscular preparations of crustaceans, where it increases transmitter release, causing firing of the axons. Three disulphide bonds are present in this protein. There are 25 known family members. Topology is 1-5 2-4 3-6. FIG. 87.

[0579] 1) CxCxxxxxxxxxxxxxxxx(xx)xxxxC(xxx)xxxxxxCxxxxxxxxxCC

[0580] 2) CxCxxxxPxxrxxxxxGxx(xx)xxxxC(xxx)xxxWxxCxxxxxxxxxCC

[0581] PF05294: Toxin 5

[0582] Scorpion short toxins. FIG. 46.

[0583] PF05453: Toxin 6

[0584] FIG. 90. This family consists of toxin-like peptides that are isolated from the venom of Buthus martensii Karsch scorpion. The precursor consists of 60 amino acid residues, with a putative signal peptide of 28 residues and an extra residue, and a mature peptide of 31 residues with an amidated C-terminal. The peptides share close homology with other scorpion K+ channel toxins and should present a common three-dimensional fold, the Cysteine-Stabilised alphabeta (CSalphabeta) motif. This family acts by blocking small conductance calcium activated potassium ion channels in their victim. Topology is 1-4 2-5 3-6. Motif is CxxCxxxCxxxxxxx(xx)C(xx)xxxxxCxC

[0585] PF05980: Toxin 7

[0586] This family consists of several short spider neurotoxin proteins including many from the Funnel-web spider (W. S. Skinner, et al. (1989) J Biol Chem, 264: 2150-55). See FIG. 64.

[0587] Topology is 1-4 2-5 3-8 6-7.

[0588] 1) CxxxxxxCxxxxxxxCCxxxxxCxCxxxxxCxC

[0589] 2) CxxxxxxCxxWxxxxCCxgxxYCxCxxxpxCxC

[0590] PF07365: Toxin 8

[0591] Alpha-conotoxin and precursors. This family consists of several alpha conotoxin precursor proteins from a number of Conus species. The alpha-conotoxins are small peptide neurotoxins from the venom of fish-hunting cone snails which block nicotinic acetylcholine receptors (nAChRs). FIG. 72.

[0592] PF00095: Toxin 9

[0593] This family of spider neurotoxins are thought to be calcium ion channel inhibitors.

[0594] See FIG. 63. Topology is 1-4 2-5 3-8 6-7.

[0595] 1) Cxx(x)xxxxCxxxxxCCxxx(x)xCxCxxxxxCxC

[0596] 2) Cxx(x) yxxxCxxgxxCCxrx(x)xCxCxxxxnCxC

[0597] PF07473: Toxin 11

[0598] This family consists of several spasmodic peptide gm9a sequences (M. B. Lirazan, et al. (2000) Biochemistry, 39: 1583-8). See FIG. 27, DBP: 1-5 2-4 3-6

[0599] Motif: CxxxCxxxxxCxxxCxC

[0600] PF07740: Toxin 12

[0601] HaTx1 is a 35 amino acid peptide toxin that was isolated from Chilean tarantula venom. It inhibits the drk1 voltage-gated K(+) channel not by blocking the pore, but by altering the energetics of gating (H. Takahashi, et al. (2000) J Mol Biol, 297: 771-80). See FIG. 50.

[0602] Topology is 1-4 2-5 3-6. Motif is CxxxxxxCxxxxx(x)CCxxxxCxxx(xxx)x(xx)xxC

[0603] PF07822: Toxin 13

[0604] The members of this family resemble neurotoxin B-IV, which is a crustacean-selective neurotoxin produced by the marine worm Cerebratulus lacteus. This highly cationic peptide is approximately 55 residues and is arranged to form two antiparallel helices connected by a well-defined loop in a hairpin structure. The branches of the hairpin are linked by four disulphide bonds. Three residues identified as being important for activity, namely Arg-17, -25 and -34, are found on the same face of the molecule, while another residue important for activity, Trp30, is on the opposite side. The protein's mode of action is not entirely understood, but it may act on voltage-gated sodium channels, possibly by binding to an as yet uncharacterized site on these proteins. Its site of interaction may also be less specific, for example it may interact with negatively charged membrane lipids. See FIG. 65.

[0605] PF07829: Toxin 14

[0606] Alpha-A conotoxin PIVA is the major paralytic toxin found in the venom produced by the piscivorous snail Conus purpurascens. This peptide acts by blocking the acetylcholine binding site of the nicotinic acetylcholine receptor (K. J. Nielsen, et al. (2002) J Biol Chem, 277: 27247-55). See FIG. 66.

[0607] Motif 1: CCxxxxxxxCxxCxCx(x)xxxxxC, Motif 2: CCgxxpxxxChpCxCx(x)xxpxxC

[0608] PF07945: Toxin 16

[0609] Janus Atracotoxin family. This family includes three peptides secreted by the spider Hadronyche versuta. These are insect-selective, excitatory neurotoxins that may function by antagonizing muscle acetylcholine receptors, or acetylcholine receptor subtypes present in other invertebrate neurons. Janus atracotoxin-Hv1c is organised into a disulphide-rich globular core (residues 3-19) and a beta-hairpin (residues 20-34). There are 4 disulphide bridges, one of which is a vicinal disulphide bridge; this is known to be unimportant in the maintenance of structure but important for insecticidal activity. There are 3 known family members. Topology is 1-6 2-7 3-4 5-8. FIG. 91.

[0610] 1) CxxxxxxCxxCCxCCxxxxCxxxxxxxxxxC

[0611] 2) CxgxxxpCxxCCpCCpgxxCxxxxxxgxxyC

[0612] PF08086: Toxin 17

[0613] This family consists of ergtoxin peptides which are toxins secreted by the scorpions. The ergtoxins are capable of blocking the function of K+ channels. More than 100 ergtoxins have been found from scorpion venoms and they have been classified into three subfamilies according to their primary structures (K. Frenal, et al. (2004) Proteins, 56: 367-75). There are 25 known family members. Topology is 1-4 2-6 3-7 5-8. See FIG. 60.

[0614] 1) CxxxxxCxxxxxxxxCxxCCxxxxxxxxxCxxxxCxC

[0615] 2) drdxCxDxxxCxxygxyxxCxxCCxxxgxxxgxCxxxxCxC

[0616] PF08087: Toxin 18

[0617] Conotoxin O-superfamily. This family consists of members of the conotoxin O-superfamily. The O-superfamily of conotoxins consists of 3 groups of Conus peptides that belong to the same structural group. These 3 groups differ in their pharmacological properties: the w-conotoxins which inhibit calcium channels, the delta-conotoxins which slow down the inactivation rate of voltage-sensitive sodium channels and the muO-conotoxins block the voltage sensitive sodium currents. See FIG. 31.

[0618] Motif 1: CxxxxxxCxxxxxCCx(xx)xxCxxxxxxC,

[0619] Motif 2: CxxxgxxCxxxxxCCx(xx)gxCxxxfxxC

[0620] PF08088: Toxin 19

[0621] Conotoxin I-superfamily. See FIG. 6. This family consists of the I-superfamily of conotoxins. This is a new class of peptides in the venom of some Conus species. These toxins are characterised by four disulfide bridges and inhibit of modify ion channels of nerve cells. The I-superfamily conotoxins is found in five or six major clades of cone snails and could possible be found in many more species.

[0622] PF08089: Toxin 20

[0623] Huwentoxin family. This family consists of the huwentoxin-II (HWTX-II) family of toxins secreted by spiders. These toxins are found in venom that secreted from the bird spider Selenocosmia huwena Wang. The HWTX-II adopts a novel scaffold different from the ICK motif that is found in other huwentoxins. HWTX-II consists of 37 amino acids residues including six cysteines involved in three disulfide bridges. See FIG. 5.

[0624] PF08091: Toxin 21

[0625] This family is a member of the Omega toxin-like clan. This family consists of insecticidal peptides isolated from spider venom. See FIG. 58. There are 4 known family members. Topology is unknown. No structures are available.

[0626] 1) CxxxxxxCxxxxxCCxxxCxxxxxxCxxxxxxCxxxC

[0627] 2) CxxxxxPCxnxxxCCxgxCxxxxWxCxxxxxxCskxC

[0628] PF08092: Toxin 22

[0629] See FIG. 4. This family consists of Magi peptide toxins (Magi 1, 2 and 5) isolated from the venom of Hexathelidae spider. These insecticidal peptide toxins bind to sodium channels and induce flaccid paralysis when injected into lepidopteran larvae. However, these peptides are not toxic to mice when injected intracranially at 20 pmol/g.

[0630] PF08093: Toxin 23

[0631] See FIG. 3. This family consists of toxic peptides (Magi 5) found in the venom of the Hexathelidae spider. Magi 5 is the first spider toxin with binding affinity to site 4 of a mammalian sodium channel and the toxin has an insecticidal effect on larvae, causing paralysis when injected into the larvae.

[0632] PF08094: Toxin 24

[0633] Conotoxin TVIIA/GS family. This family consists of conotoxins isolated from the venom of cone snail Conus tulipa and Conus geographus. Conotoxin TVIIA, isolated from Conus tulipa displays little sequence homology with other well-characterised pharmacological classes of peptides, but displays similarity with conotoxin GS, a peptide from Conus geographus. Both these peptides block skeletal muscle sodium channels and also share several biochemical features and represent a distinct subgroup of the four-loop conotoxins (J. M. Hill, et al. (2000) Eur J Biochem, 267: 4642-8). See FIG. 28.

[0634] 1) CxxxxxxCxxxCCxxxxCxxxxxxxC

[0635] 2) CxGxxxxCPPxCCxGxxCxxGxxxxC

[0636] PF08095: Toxin 25

[0637] Hefutoxin family. This family consists of the hefutoxins that are found in the venom of the scorpion Heterometrus fulvipes. These toxins, kappa-hefutoxin1 and kappa-hefutoxin2, exhibit no homology to any known toxins. The hefutoxins are potassium channel toxins and exhibit a 1-4 2-3 topology. FIG. 173.

[0638] PF08097: Toxin 26

[0639] Conotoxin T superfamily. See FIG. 2. This family consists of the T-superfamily of conotoxins. Eight different T-superfamily peptides from five Conus species were identified. These peptides share a consensus signal sequence, and a conserved arrangement of cysteine residues. T-superfamily peptides were found expressed in venom ducts of all major feeding types of Conus, suggesting that the T-superfamily is a large and diverse group of peptides, widely distributed in the 500 different Conus species.

[0640] PF08099: Toxin 27

[0641] Scorpion Calcine family. See FIG. 1. This family consists of the calcine family of scorpion toxins. The calcine family consists of Maurocalcine and Imperatoxin. These toxins have been shown to be potent effector of ryanodyne-sensitive calcium channel from skeletal muscles. These toxins are thus useful for dihydropyridine receptor/ryanodyne receptor interaction studies.

[0642] PF08116: Toxin 29

[0643] This family consists of PhTx insecticidal neurotoxins that are found in the venom of Brazilian, Phoneutria nigriventer. The venom of the Phoneutria nigrivente contains numerous neurotoxic polypeptides of 30-140 amino acids which exert a range of biological effects. While some of these neurotoxins are lethal to mice after intracerebroventricular injections, others are extremely toxic to insects of the orders Diptera and Dictyoptera but had much weaker toxic effects on mice. See FIG. 7.

[0644] PF08117: Toxin 30

[0645] Also called Ptu family. This family consists of toxic peptides that are isolated from the saliva of assassin bugs. The saliva contains a complex mixture of proteins that are used by the bug either to immobilise the prey or to digest it. One of the proteins (Ptu1) has been purified and shown to block reversibly the N-type calcium channels and to be less specific for the L- and P/Q-type calcium channels expressed in BHK cells

[0646] Topology 1-4 2-5 3-6; 3 members. See FIG. 79.

[0647] 1) CxxxxxxCxxxxxxCCxxxxxCxxxxxxC

[0648] 2) CxxxgxxxCxgxxkxCCxxxxxCxxyanxC

[0649] PF08119: Toxin 31

[0650] This family consists of acidic alpha-KTx short chain scorpion toxins. These toxins named parabutoxins, block voltage-gated K channels and have extremely low pI values. Furthermore, they lack the crucial pore-plugging lysine. In addition, the second important residue of the dyad, the hydrophobic residue (Phe or Tyr) is also missing. See FIG. 8.

[0651] PF08120: Toxin 32

[0652] See FIG. 9. This family consists of the tamulustoxins, which are found in the venom of the Indian red scorpion (Mesobuthus tamulus). Tamulustoxin shares no similarity with other scorpion venom toxins, although the positions of its six cysteine residues suggest that it shares the same structural scaffold. Tamulustoxin acts as a potassium channel blocker.

http:www.ncbi.nlm.nih.gov/entrez/guery.fcgi?cmd=Retrieve&db=PubMed&dopt-Abstract&list_uids=11361010

[0653] PF08396: Toxin 34

[0654] Spider toxin omega agotoxin/Tx1 family. The Tx1 family lethal spider neurotoxin induces excitatory symptoms in mice. See FIG. 10.

[0655] PF01033: Somatomedin

[0656] See FIG. 14. Somatomedin B, a serum factor of unknown function, is a small cysteine-rich peptide, derived proteolytically from the N-terminus of the cell-substrate adhesion protein vitronectin. The SMB domain contains eight Cys residues, arranged into four disulfide bonds (Y. Kamikubo, et al. (2004) Biochemistry, 43: 6519-34). It has been suggested that the active SMB domain may be permitted considerable disulfide bond heterogeneity or variability, provided that the Cys25-Cys31 disulfide bond is preserved. The three dimensional structure of the SMB domain is extremely compact and the disulfide bonds are packed in the center of the domain forming a covalently bonded core. The protein can be expressed as a soluble fusion protein with the C-terminal domain of thioredoxin.

[0657] 1) Cxx(x)xCxxxxxxxxxxCxCxxxCxxxxxCCxxxxxxC

[0658] 2) Cxx(x) rCxxxxxxxxCxCxxxCxxxxxCCxDxxxxC

[0659] 3) Cxx(x) RCxexxxxxxxxCxCxxxCxxxxxCCxd[yf]xxxC

[0660] A 1-2 3-4 5-6 7-8 topology has been described, but other isomers are also possible and consistent with NMR structure calculations.

[0661] PF00087, PF00021: Three Finger Toxin family

[0662] See FIG. 14-18. A family of venomous neurotoxins and cytotoxins. Structure is small, disulfide-rich, nearly all beta sheet. This family is a member of the uPAR/Ly6/CD59/snake toxin-receptor superfamily clan. This clan includes the following Pfam members: Activin_recp; BAMBI; PLA2_inh; Toxin_{—}1; UPAR_LY6.

[0663] A preferred library strategy is to randomize the three longest loops, which are between Cys1-Cys2, Cys3-Cys4 and Cys5-Cys6. Two different design strategies are used: 1) the disulfide core remains intact while mutagenizing only the three loops, 2) mutagenesis in the disulfide core is allowed and may yield a higher diversity of loop arrangements. The most conserved cysteine spacing is at position n6=0 and n7=4 (‘n6’ is defined as between C6 and C7; ‘n7’ is between C7 and C8). This information is used to evaluate the remaining CDP. The most common CDP is 10,6,16 3,10,0,4 with 69 members.

[0664] 1) Cxxxxxxxxxx(xxx)Cxxxx(xx)Cxxxxxxxxxxxx(x)xxxxCx(xx)CxxxxxxxxxxCCxxxxC

[0665] 2) Cyxxxxxxxxx(xxx)Cpxgx(xx)Cyxkx(wf)xxxxxx(x)xxxxGCx(xt)CPxxxxxxxxxCCx(ts)DxC

[0666] PF01607, PF00187: Chitin binding proteins

[0667] There are two different cysteine-rich chitin binding families (Z. Shen, et al. (1998) J Biol Chem, 273: 17665-70); T. Suetake, et al. (2000) J Biol Chem, 275: 17929-32; T. Suetake, et al. (2002) Protein Eng, 15: 763-9). PF00187 is found in fungi and plants and includes wheat germ agglutinin. Hevein is a prototypical member containing four disulfide bonds. The family includes 382 known family members with highly conserved cysteine positions and the topology 1-4 2-5 3-6 7-8. Advantages of this family for use as a scaffold in library design include the small number (<3) of amino acids at the N-terminal position of the first cysteine and the C-terminal position of the last cysteine. The distance between individual cysteines is lower than 10 and the domain is rich in disulfide bonds (approximately 50 amino acids with four disulfide bonds). The DBP is the most common 1-4 2-5 3-6 topology. The domain is found in repeats in nature.

[0668] PF01607 is also called Peritrophin domain and is found in animals and insects as part of extracellular matrix proteins. This domain also occurs in the small peptide tachycitin. Structural comparison of tachycitin and hevein (PF00187) reveals structural similarities (see alignment). Tachycitin contains five disulfide bonds, but members of this family typically contain 3SS (see logo). Tachycitin's 3 signature SS exhibit 1-3 2-6 4-5 topology. There are 1075 known family members. The cysteine positions are highly conserved. Not many (<3) amino acids N-terminal of the first cysteine and C-terminal of last cysteine.

[0669] See FIGS. 19-21.

[0670] PF00187 Chitin binding proteins:

[0671] CxxxxxxxxCxxxxCCxxxxxCxxxxxxCxxxCxxxC

[0672] CgxqxxxxxCxxxxCCsxxGxCGxxxxyCxxxCxxxC

[0673] PF01607 Chitin binding domain:

[0674] 1) Cxxx(x)xxxxxxx(x)xxxC(x)xxxxxCxxxxxxxxxCxxxxxxxxxxxxCxxxxxxxx

[0675] 2) Cxxx(x)xxgxxxx(x)xxxC(x)xx[yf]xxCxxxxxxxxxCxxgxxfxxxxxxCxxxxxxxxC

[0676] PF01826: Trypsin inhibitor

[0677] This family contains trypsin inhibitors as well as a domain found in many extracellular proteins [N. D. Rawlings, et al. (2004) Biochem J, 378: 705-16]. The domain typically contains ten cysteine residues that form five disulphide bonds. The DBP is 1-7 2-6 3-5 4-10 8-9. 414 Family members are known. The cysteine positions are highly conserved. See FIG. 23.

CxxxxxxxxCxxxCxxxCxxxx(xxxxx)xxxCx(xxxxxxx)xxCxxx(x)CxCxxxxxxxxx(xx)xCxxxxxC

[0678] PF02428: Potato protein inhibitors

[0679] This family is found in repeats on the genetic level. The protein is synthesized as a large precursor protein. Proteolytic cleavage occurs within repeats, rather than between repeats, to yield the mature microprotein [E. Barta, et al. (2002) Trends Genet, 18: 600-3][N. Antcheva, et al. (2001) Protein Sci, 10: 2280-90].

[0680] A large precursor protein is synthesized, but disulfide topology for precursor is unknown.

[0681] The repeat unit was expressed and its NMR structure was solved. The fold is similar to the mature microprotein suggesting that circular permutation has occurred and that this unit was the ancestor. This is supported by the discovery of a circular permuted protein that corresponds to the repeat unit. The linker or protease site (EEKKN) is present as a disordered loop in the structure of the ancestor. See FIG. 24.

[0682] 1) CxxxCxxxxxxxxCxxxxxx(x)xxxxxCxxCCxxxxxCxxxxxxxxxxC

[0683] 2) CxxxCxxxxxxxxCPxxxxx(x)xxxxxCxxCCxxxxGCxxxxxxGxxxC

[0684] Due to the proteolytic processing, the sequence of the mature microprotein is different form the logo shown above:

[0685] 2C2CC5C10C11C3C8C2 (mature logo-protein level)

[0686] 3C3C8C12C2CC5C10C2 (repeat logo-genetic level)

[0687] PF00304: Gamma Thionin

[0688] In their mature form, these small plant proteins generally consist of about 45 to 50 amino-acid residues. The folded structure of Gamma-purothionin is characterised by a well-defined 3-stranded anti-parallel-sheet and a short helix. Three disulphide bridges are located in the hydrophobic core between the helix and sheet, forming a cysteine-stabilized-helical motif (P. B. Pelegrini, et al. (2005) Int J Biochem Cell Biol, 37: 2239-53). This structure is analogous to scorpion toxins and insect defensins (C. Bloch, Jr., et al. (1998) Proteins, 32: 334-49).

[0689] The domain shows high disulfide density with 4 disulfide bonds per approximately 50 amino acids and a topology of 1-8 2-5 3-6 4-7. The cysteine spacing between individual cysteines is smaller than 10 and therefore preferred for library design. The cysteine positions are highly conserved among different members of this family. See FIG. 25.

[0690] PF00304—Gamma-Thionin:

[0691] Motif 1: CxxxxxxxxxCxxxxxCxxxCxxxxxx(x)xxxCxx(x)xxxxCxCxxxC

[0692] Motif 2: CxxxSxxFxGxCxxxxxCxxxCxxxxxx(x)xGxCxx(x)xxxxCxCxxxC

[0693] PF02950: Omega-Conotoxin

[0694] Conotoxins are small snail neurotoxins that block ion channels. Omega-conotoxins act at presynaptic membranes and bind and block the calcium channels (W. R. Gray, et al. (1988) Annu Rev Biochem, 57: 665-700). The domain shows high disulfide density with three disulfide bonds per approximately 24 amino acids. There are more than 380 known family members. The cysteine spacing between individual cysteines is smaller than 10 and therefore preferred for library design. The cysteine positions are highly conserved among different members of this family which has a DBP of 1-4 2-5 3-6.

[0695] See FIG. 26. Motif: C(xx)xxxxxCCxx(xx)xCx(xxx)xxCC

[0696] Ziconotide is a 25AA conotoxin that has been FDA approved ‘Prialt’). Ziconotide has been in >7000 patients and is non-immunogenic (<1% incidence), which makes this a promising scaffold for new binding proteins for use in humans. The sequence and 1-4 2-5 3-6 DBP is shown in FIG. 12.

[0697] PF05374: Mu-conotoxin

[0698] Mu-conotoxins are peptide inhibitors of voltage-sensitive sodium channels (K. J. Nielsen, et al. (2002) J Biol Chem, 277: 27247-55). See FIG. 29. DBP: 1-4 2-5 3-6

[0699] Motif 1: CCxxxxxCxxxxCxxxxCC Motif 2: CCxxpxxCxxxxCxPxxCC

[0700] PF02822: Antistasin

[0701] Peptide proteinase inhibitors can be found as single domain proteins or as single or multiple domains within proteins; these are referred to as either simple or compound inhibitors, respectively (R. Lapatto, et al. (1997) Embo J, 16: 5151-61). In many cases they are synthesised as part of a larger precursor protein, either as a prepropeptide or as an N-terminal domain associated with an inactive peptidase or zymogen. The Pfam definition includes only six cysteines with a DBP of 1-4 2-5 3-6. However, most members of the family (1bx7, 1hia) contain two more N-terminal disulfides. This family can therefore be extended on the N-terminus.

[0702] The domain shows high disulfide density with 3-5 disulfide bonds per 39-54 amino acids and a topology of 1-3 2-4 5-8 6-9 7-10. The cysteine spacing between individual cysteines is smaller than 10 and therefore preferred for library design. The cysteine positions are highly conserved among different members of this family. See FIG. 32.

[0703] Members of this family are very hydrophilic which is preferred for library design (low non-specific binding, low number of T-cell epitopes). For example, hirustasin contains a total of only 6 hydrophobic residues. The crystal structure displays a near absence of secondary structure elements. This, in combination with the high number of possible disulfide isomers of 5SS, makes this a very useful scaffold for library design.

Cysteine positions are highly conserved, for 5 disulfides: C4C5C6C1C4C4C10C5C1C

[0704] PF02822—Antistasin:

[0705] 1) CxxxxCxxxxxCxxxxxxCx CxxxxC(x)xxxCxxxxxxxxxCx(xxx)xCxC

[0706] 2) CxxxxCxxxxxCxxxxxxCxCxxxxC(x)xxxCxxGxxxdxxgCx(xxx)xCxC

[0707] 3) CxxxxCxxxxxCxxxxxxCxCxxxxC(x)xxxCpyGxxxdxxgCx(xxx)xCxC

[0708] Short version lacking the N-terminal four cysteine residues:

[0709] 1) CxxxxC(x)xxxCxxxxxxxxxCx(xxx)xCxC

[0710] 2) CxxxxC(x)xxxCxxGxxxdxxgCx(xxx)xCxC

[0711] 3) CxxxxC(x)xxxCpyGxxxdxxgCx(xxx)xCxC

[0712] PF05039: Agouti-related

[0713] See FIG. 33. The agouti protein regulates pigmentation in the mouse hair follicle producing a black hair with a subapical yellow band. A highly homologous protein agouti signal protein (ASIP) is present in humans and is expressed at highest levels in adipose tissue where it may play a role in energy homeostasis and possibly human pigmentation (J. C. McNulty, et al. (2001) Biochemistry, 40: 15520-7; J. Voisey, et al. (2002) Pigment Cell Res, 15: 10-8).

[0714] The disulfide bond between Cys5 and Cys10 is not necessary for structure and function. Upon removal, the DBP becomes 1-4 2-5 3-8 6-7. The first three disulfide bonds form the signature cystine knot motif. The receptor binding site includes the RFF motif between Cys7 and Cys8 and a loop formed by the first 16 amino acids. The C terminus is disordered and can be removed (Note that Cys1 and Cys10 are not present in the Pfam logo).

[0715] The following logo is preferred for library design: PF05039—Agouti:

[0716] 1) CxxxxxCxxxxxxCCxxCxxCxCxxxxxxCxCxxxxxxxxxC

[0717] 2) CxxxxSCxxxxxxCCDPCxxCxCRFFxxxCxCRxxxxxxxxC

[0718] 3) CxxxxSCxGxxxPCCDPCAxCxCRFFxxxCxCRxLxxxxxxC

[0719] An engineered protein with a shorter C-terminus and lacking cysteine 5 and cysteine 10 folds into a similar structure as the native protein. This engineered version is used as a scaffold for library design and has the following logos: CxxxxxCxxxxxxCCxxxxxCxCxxxxxxCxCx, CxxxxxCxxxxxxCCDPxxxCxCRFFxxxCxCRxx, CxGxxxCxxxxxxCCDPAxxCYCRFFxxxCxCRxx

[0720] Full-length agouti protein can be expressed as a soluble protein in Escherichia coli (R. D. Rosenfeld, et al. (1998) Biochemistry, 37: 16041-52).

[0721] PF05375: PMP inhibitors/Pacifastin

[0722] Structures of members of this family show that they are comprised of a triple-stranded antiparallel beta-sheet connected by three disulfide bridges, which defines this family as a novel family of serine protease inhibitors (G. Simonet, et al. (2002) Comp Biochem Physiol B Biochem Mol Biol, 132: 247-55; A. Roussel, et al. (2001) J Biol Chem, 276: 38893-8). See FIG. 34.

[0723] There are 39 family members. The cysteine positions are highly conserved with a disulfide topology of 1-4 2-6 3-5. The distances between individual cysteines are <10. The C-terminus is not visible in structures suggesting that it can be omitted from library design. Two strongly conserved amino acids are N15 and T29, which are involved in forming and stabilizing a protease binding loop. They can be omitted from library design to increase binding diversity.

[0724] 1) CxxxxxxxxxCxxCxCxxxx(x)xxxCxxxxC

[0725] 2) CxpGxxxKxxCNxCxCxxxx(x)xxxCTxxxC

[0726] PF01549: ShTK family and Stecrisp

[0727] Stecrisp exhibits a highly similar 3D structure to ShTK family, but is not part of the ShTK family (PF01549) (M. Guo, et al. (2005) J Biol Chem, 280: 12405-12). Blast search with the Stecrisp protein sequence yields 48 matches with 30-100% identity, but does not yield any ShTK family members. See FIG. 35-36.

[0728] Pfam01549 is a domain of unknown function and is found in several C. elegans proteins. The domain is 30 amino acids long and has 6 conserved cysteine positions that form three disulphide bridges. The domain is named (by SMART) after ShK toxin. (M. Dauplais, et al. (1997) J Biol Chem, 272: 4302-9).

[0729] The domain shows high disulfide density with 3 disulfide bonds per 39 amino acids and a topology of 1-6 2-4 3-5. The cysteine spacing between individual cysteines is smaller than 10 and therefore useful for library design. The cysteine positions are highly conserved among different members of this family.

[0730] PF01549—ShTK. See FIG. 35:

[0731] 1) Cx(xxx)xxx(x)xxCxxxxxx(xx)Cxxxx(x)xxxxxxxxCxxxCxxC

[0732] 2) Cx(dxx)dxx(x)xxCxxxxxx(xx)Cxxxx(x)xxxxxxxCxxtCxxC

[0733] C-terminal domain of STECRISP and related sequences: see FIG. 36.

[0734] PF07974: EGF2 domain

[0735] Members of this family all belong to the EGF superfamily, which is characterised as having 6-8 cysteines forming 3-4 disulfide bonds, in the order 1-3, 2-4, 5-6, which are essential for the stability of the EGF fold. These disulphide bonds are stacked in a ladder-like arrangement. The Laminin EGF family is distinguished by having an additional disulphide bond. The function of the domains within this family remains unclear, but they are thought to largely perform a structural role. More often than not, the domains are arranged in tandem repeats in extracellular proteins.

[0736] PF07974—EGF2: See FIG. 37.

[0737] 1) Cx(xxxxxx)Cxx(x)xxxCxxxx(xxxxxxxx)CxCxxx(xxxx)xxxxxC

[0738] 2) Cx(xxxxxx)Cxx(x)xGxCxxxx(xxxxxxxx)CxCxxx(xxxx)xxGxxC

[0739] Other EGF-like domains:

[0740] PF00008—EGF: See FIG. 38.

[0741] 1) CxxxxxCxxxxxCxxxxx(xx)xxxCxCxxx(xxxx)xxxxxC

[0742] 2) CxxxxxCxxxgxCxxxxx(xx)xxxCxCxxg(xxxx)xxgxxC

[0743] PF00053—Lam-EGF: See FIG. 39. DBP: 1-3 2-4 5-6 7-8

[0744] 1) CxCxxxxxxxx(xx)Cxxxxxxxxx(xxxx)CxxCxxxxxxxxCxxCxxxxxxxxxx(xxxxx)C

[0745] 2) CxCxxxxxxxx(xx)Cxxxxxxxxx(xxGx)CxxCxxxxxGxxC(DE)xCxxxxxxxxxx(xxxxx)C

[0746] PF07645: Ca-EGF: See FIG. 40.

[0747] 1) CxxxxxxxCxxxxxx(xx)CxxxxxxxCx(xxxx)Cxxxxxxxxxx(xxxxxxx)C

[0748] 2) CxxxxxxxCxxxxxx(xx)CxNxxGx(F,Y)xCx(xxxx)Cxx(G,Y)xxxxxxx(xxxxxxx)C

[0749] PF04863: Allinase EGF-like: See FIG. 41.

[0750] 1) Cxxxxxxxxxxxxxxxx(xxxx)CxCxxCxxxxxCxxxxxxC

[0751] 2) Cxxxxxxxxxxxxxxxx(xxxx)CxCxxCxxxxxCxxxxxxC

[0752] PF00323: Mammalian Defensin; Defensin 1

See FIG. 45. DBP: 1-6 2-4 3-5

1) CxCxxxxCxxxxxxxxxCxxxxxxxxxCC

2) CxCRxxxCxxxErxxGxCxxxgxxxxxCC

PF01097: Arthropod Defensin; Defensin 2

See FIG. 44. DBP: 1-4 2-5 3-6

1) CxxxCxxxxxxxxxCx(xxx)xxxCxC

2) CxxHCxxxgxxGGxCxx(xx)xxxCxC

[0753] PF00711: Defensin B, Beta-Defensin

See FIG. 43. DBP: 1-4 2-5 3-6 or 1-5_{—}2-4_{—}3-6

[0754] 1) CxxxxxxCxxxxCxxxxxxxxxCxxxxxxCC

[0755] 2) CxxxxgxCxxxxCxxxxxxxgxCxxxxxxCC

PF08131: Defensin-like; Defensin 3 FIG. 42.

[0756] 1) Cxxxx(GxCrxkxxxnCxxxxxxxCxnxxqkCC

2) CxsxxGxCrxkxxxnCxxxxxxxCxnxxqkCC

[0757] The Defensin-(like-)3 family consists of the defensin-like peptides (DLPs) isolated from platypus venom (A. M. Torres, et al. (1999) Biochem J, 341 (Pt 3): 785-94). These DLPs show similar three-dimensional fold to that of beta-defensin-12 and sodiuim-channel neurotoxin Sh1. However the side chains known to be functionally important to beta-defensin-12 and Sh1 are not conserved in DLPs. This suggests a different biological function. Consistent with this contention, DLPs have been shown to possess no anti-microbial properties and have no observable activity on rat dorsal-root-ganglion sodium-channel currents. Only three members are known, but the similarity to beta defensins makes this an attractive scaffold.

[0758] The domain shows high disulfide density with 3 disulfide bonds per approximately 36 amino acids with a topology of 1-5_{—}2-4_{—}3-6. The cysteine spacing between individual cysteines is smaller than 10 and therefore useful for library design. The cysteine positions are highly conserved among different members of this family.

[0759] PF00321: Crambins

[0760] Crambins are small, basic plant proteins, 45 to 50 amino acids in length, which include three or four conserved disulphide linkages. The proteins are toxic to animal cells, presumably attacking the cell membrane and rendering it permeable: this results in the inhibition of sugar uptake and allows potassium and phosphate ions, proteins, and nucleotides to leak from cells This family is different from gamma-thionin PF00304 (P. B. Pelegrini, et al. (2005) Int J Biochem Cell Biol, 37: 2239-53).

[0761] The domain shows high disulfide density with 4 disulfide bonds per approximately 46 amino acids. The cysteine spacing between individual cysteines is smaller than 10 and therefore useful for library design. The cysteine positions are highly conserved among different members of this family. See FIG. 46.

[0762] Cysteine positions are highly conserved, Distance between individual cysteines are around 10 and lower, topology 1-6 2-5 3-4; Domain is small with 6 cysteines

[0763] Motifs for members containing three disulfide bonds are

[0764] PF00321—Crambins:

[0765] 1)xxCCxxxxxxxxxxCxxxxxxxxxCxxxxxCxxxxxxxCxxxxxx

[0766] 2)xxCCxxxxxRxxYxxCxxxGxxxxxCxxxxxCxIxxxxxCxxxxxx

[0767] 3)xxCCxxxxxRxxYxxCRxxGxxxxxCAxxxxCxIISGxxCPxx(Y,F)xx

[0768] Motifs for members with four disulfide bonds and the topology 1-8 2-7 3-6 4-5 are characterized by the following logos: xxCCxxxxxxxCxxxCxxxxxxxxCxxxCxCxxxxxxxC

[0769] PF06360: Raikovi

[0770] Diffusible peptide pheromones with only 6 family members, but high diversity in inter-cysteine amino acids (M. S. Weiss, et al. (1995) Proc Natl Acad Sci USA, 92: 10172-6). The cysteine positions are highly conserved with a topology of 1-4 2-6 3-5. The distance between individual cysteines is <10. See FIG. 47.

[0771] 1) CxxxxxxCxxxxCxxxCxxxxxxxxCxxxxxxxxxC

[0772] 2) CxxaxxxCxxxxCxxxCxxxxxxxxCxxxxxxxxxC

[0773] PF00683: TB domain

[0774] Transforming growth factor (TGF-)-binding protein-like (TB) domain comes from human fibrillin. This domain is found in fibrillins and latent TGF-binding proteins (LTBPs) which are localized to fibrillar structures in the extracellular matrix. (X. Yuan, et al. (1997) Embo J, 16: 6659-66). Repeat means that this domain is found in multiple copies in fibrillins and LTBP, but NOT in tandem. See FIG. 49.

[0775] Logo shows only 6 conserved cysteines. Three structures were analyzed (1uzq, 1apj, 1ksq): one missing cysteine is inserted between Cys1 and the Cys triplett (positions 8/12, 4/12, 9/12), and the last cysteine missing in logo. The topology is 1-3 2-6 4-7 5-8.

[0776] 1) CxxxxxxxxxxxxxCCCxxxx(xx)xxxxxCxxCPxxxxxxxC

[0777] 2) Cxxxxxxx(x)xxkxxCCCxxxx(xx)xxgxxCexCPxxxxxxxC

[0778] PF00093: von Willebrand factor type C domain

[0779] The vWF domain is found in various plasma proteins, complement factors, the integrins, collagen types VI, VII, XII and XIV; and other extracellular proteins (P. Bork (1993) FEBS Lett, 327: 125-30). There are 488 known family members with highly conserved cysteine residues. Structure and sequence comparisons have revealed an evolutionary relationship between the N-terminal sub-domain of the CR module and the fibronectin type 1 domain, suggesting that these domains share a common ancestry (J. M. O'Leary, et al. (2004) J Biol Chem, 279: 53857-66). See FIG. 50.

[0780] Mini-Collagen Cysteine-Rich Domain

[0781] Mini collagens are found in the cell wall of Hydra. Mini collagens contain a C-terminal cysteine-rich domain that is synthesized as intra molecular disulfide bonded precursor. The C-terminal domain is a microprotein with a unique fold (S. Meier, et al. (2004) FEBS Lett, 569: 112-6; E. Pokidysheva, et al. (2004) J Biol Chem, 279: 30395-401). Only cysteine residues are highly conserved among 16 family members. Disulfide bonds are thought to be shuffled to intermolecular disulfide bonds to form a cell wall stabilizing matrix. The disulfide topology is 1-5 2-4 3-6. The observation that C-terminal domains form intermolecular disulfide bonds with each other can be exploited to create combinatorial libraries of dimeric molecules linked by intermolecular disulfide bonds. See FIG. 136.

Motif: C3C3C3C3CC in minicollagen and C5C3C3C3C3CC in Hydra HOWA protein, where this domain occurs as a repeat.

[0782] PF03784: Cyclotide

[0783] This family contains a set of cyclic peptides with a variety of activities. The structure consists of a distorted triple-stranded beta-sheet and a cysteine-knot arrangement of the disulfide bonds (D. J. Craik, et al. (1999) J Mol Biol, 294: 1327-36). See FIG. 51.

[0784] Topology is 1-4_{—}2-5_{—}3-6

[0785] 1) CxxxCxxxxCxxxxxxxCxCxxxxC

[0786] 2) CxExCxxxxCxxxxxxGCxCxxxxC

[0787] PF06446: Hepcidin

[0788] Hepcidin is an antibacterial and antifungal protein expressed in the liver and is also a signaling molecule in iron metabolism. The hepcidin protein is cysteine-rich and forms a distorted beta-sheet with an unusual disulphide bond found at the turn of the hairpin.

[0789] See FIG. 52. Topology is 1-8 2-7 3-6 4-5

[0790] Motif 1: xxxCxxCCxCCxxxxCxxCC

[0791] Motif 2: FPxCxFCCxCCxxxxCGxCC

[0792] PF05353: Delta-Atracotoxin

[0793] The structure of atracotoxin comprises a core beta region containing a triple-stranded a thumb-like extension protruding from the beta region and a C-terminal helix. The beta region contains a cystine knot motif, a feature seen in other neurotoxic polypeptides. See FIG. 53.

[0794] Topology is 1-4 2-6 3-7 5-8

[0795] Motif 1: CxxxxxxCxxxxxCCCxxxCxxxxxxxxCxxxxxxxxxC

[0796] Motif 2: CxxxxxWCxxxxxCCCPxxCxxWxxxxxCxxxxxxxxxC

[0797] PF00299: Serine Protease Inhibitor

[0798] The squash inhibitors form one of a number of serine proteinase inhibitor families. They are approximately 30 residues in length and contain 6 Cys residues, which form 3 disulphide bonds. Topology is 1-4 2-5 3-6. See FIG. 56.

[0799] 1) CxxxxxxCxxxxxCxxxCxCxxxx(x)xC

[0800] 2) CPxxxxxCxxpxpCxxxCxCxxxx(x)xCG

[0801] PF01821: Anaphylotoxin-like domain

[0802] C3a, C4a and C5a anaphylatoxins are protein fragments generated enzymatically in serum during activation of complement molecules C3, C4, and C5. They induce smooth muscle contraction. These fragments are homologous to a three-fold repeat in fibulins. Topology is 1-4 2-5 3-6. There are 123 know members of this family. See FIG. 57.

[0803] 1) CCxxxxxx(xxxx)xxCxxxxxxxx(xx)xxCxxxxxxCC

[0804] 2) CCxxGxxx(xxxx)xxCxxxxxxxx(xx)xxCxxxFxxCC

[0805] PF05196: Midkine/PTN

[0806] Several extracellular heparin-binding proteins involved in regulation of growth and differentiation belong to a new family of growth factors (W. Iwasaki, et al. (1997) Embo J, 16: 6936-46). There are 33 family members. The cysteine positions are highly conserved forming a disulfide topology of 1-4 2-5 3-6. The distances between individual cysteines are <10. The NMR structure of midkine shows highly disordered N- and C-termini suggesting that these can be omitted form library design. Positively charged residues are involved in heparin binding and can be omitted from library design. See FIG. 59.

[0807] 1) CxxxxxxxCxxxxxxCxxxxxxxCxxxxxxxxCxxxC

[0808] 2) CxxWxxxxCxxxxxDCGxGRExxCxxxxxxxxCxxPCxW

[0809] PF02819: WAP “four-disulfide core”

[0810] While the pattern of conserved cysteines suggests that the sequences may adopt a similar fold, the overall degree of sequence similarity is low (L. G. Hennighausen, et al. (1982) Nucleic Acids Res, 10: 2677-84). There are 25 known family members. See FIG. 62.

[0811] Topology is 1-6 2-7 3-5 4-8.

[0812] 1)xxxx(xx)xxxxCxxx(xxx)CxxxxxCxxxxxCCxxxC

[0813] 2) CPxxx(xx)xxxxCxxx(xxx)CxxDxxCxxxxKCCxxxC

[0814] PF02048, PF07822: Toxic hairpins

[0815] Toxin 13 (PF07822) folds into a 4SS disulfide-linked alpha-helical hairpin. The SCOP database also lists heat stable enterotoxin (PF02048) as toxic hairpin with a DBP of 1-4 2-5 3-6.

[0816] The members of this family resemble neurotoxin B-IV, which is a crustacean-selective neurotoxin produced by the marine worm Cerebratulus lacteus. This highly cationic peptide is approximately 55 residues and is arranged to form two antiparallel helices connected by a well-defined loop in a hairpin structure. The branches of the hairpin are linked by four disulphide bonds. Three residues identified as being important for activity are found on the same face of the molecule, while another residue important for activity, Trp30, is on the opposite side. The protein's mode of action is not entirely understood, but it may act on voltage-gated sodium channels, possibly by binding to an as yet uncharacterized site on these proteins. See FIG. 65. Toxin 13 topology is 1-8 2-5 3-6 4-5

[0817] 1) CxxxCxxxxxxCxxCxxxxxxxxxxCxxxCxxxxxxCxxxC

[0818] 2) CxxxCxxxyxxCxxCxgxWxgxxgxCxxhCxxxxxxCxxxC

[0819] PF06357: Omega-atracotoxin

[0820] Omega-Atracotoxin-Hv1a is an insect-specific neurotoxin whose phylogenetic specificity derives from its ability to antagonise insect, but not vertebrate, voltage-gated calcium channels (X. Wang, et al. (1999) Eur J Biochem, 264: 488-94). Topology is 1-6_{—}2-7_{—}3-4_{—}5-8

[0821] See FIG. 66. Topology is 1-4_{—}2-5_{—}3-6. CxPxxxPCPYxxxxCCxxxCxxxxxxGxxxxxxC

[0822] PF06954: Resistin

[0823] This family consists of several mammalian resistin proteins. It has been demonstrated that increases in circulating resistin levels markedly stimulate glucose production in the presence of fixed physiological insulin levels, whereas insulin suppressed resistin expression.

[0824] Resistin contains a N-terminal alpha helix that participates in the multimerization of the C-terminal disulfide-rich part. See FIG. 67. Topology is 1-10 2-9 3-6 4-7 5-8

[0825] Only the disulfide-rich microprotein is shown. The N-terminal alpha-helix motif can be used for multimerization of microproteins.

[0826] 1) CxxxxxxxxxxxCxxxxxxxxCxCxxxCxxxxxxxxCxCxCxxxxxxxxCC

[0827] 2) CxxxxxxxxxxxCPxGxxxxxCxCGxxCGxWxxxxxCxCxCxxxDWxxRCC

[0828] PF00066: Notch/DSL

[0829] Extracellular domain of transmembrane protein involved in developmental processes of animals (J. C. Aster, et al. (1999) Biochemistry, 38: 4736-42; D. Vardar, et al. (2003) Biochemistry, 42: 7061-7). DSL repeat occurs in tandem (3×). Three conserved Asp or Asn residues. In the NMR structure, D12, N15, D30, D33, form a Ca2+ binding site. Only one isomer is formed in the presence of milimolar Ca2+, but multiple isomers are observed in the presence of Mg2+ or EDTA. This can be exploited for structural evolution of microproteins. There are 175 family members. The cysteine positions are highly conserved with a 1-5 2-4 3-6 topology. Not many (<3) amino acids N-terminal of first cysteine and C-terminal of last cysteine. The distance between individual cysteines are <10. See FIG. 68.

[0830] 1) Cx(xx)xxxCxxxxxxxxCxxxCxxxxCxxxxxxC

[0831] 2) Cx(xx)xxxCxxxxxxgxCxxxCnxxxCxxDGxDC

[0832] PF00020: TNFR

[0833] A number of proteins, some of which are known to be receptors for growth factors have been found to contain a cysteine-rich domain at the N-terminal region that can be subdivided into four (or in some cases, three) repeats containing six conserved cysteines all of which are involved in intrachain disulphide bond (M. D. Jones, et al. (1997) Biochemistry, 36: 14914-23). The domain contains six highly conserved cysteine residues with a topology of 1-2 3-5 4-6.

[0834] See FIG. 69.

[0835] 1) Cxxx(x)xxxxxxx(x)xxCx(x)CxxCxx(xx)xxxxxxxCxxxxxxxC

[0836] 2) Cxxx(x)x[yf]xxxxx(x)xxCx(x)CxxCxx(xx)gxxxxxxCxxxxxtxC

[0837] PF00039: Fibronectin type H domain

[0838] Fibronectin is a multi-domain glycoprotein, found in a soluble form in plasma, that binds cell surfaces and various compounds including collagen, fibrin, heparin, DNA, and actin.

[0839] See FIG. 70. 1-3 2-4 topology. Motif: CxfpfxxxxxxxxxCxxxxxxxxxxwCxxxxxxxxDxxxxxC

[0840] PF02013: Cellulose or Protein Binding Domain

[0841] Those found in aerobic bacteria bind cellulose (or other carbohydrates); but in anaerobic fungi they are protein binding domains, referred to as dockerin domains or docking domains.

[0842] 1-2 3-4 topology. See FIG. 71.

[0843] Motif: Cxx(xxx)xxxyxCCxxxxxxxxxxwcxxxxxxxxDxxxxxCxxxx(xxxx)xxxxxxxxwxxxxxxxC

[0844] PF00734: Fungal cellulose binding domain

[0845] Structurally, cellulases and xylanases generally consist of a catalytic domain joined to a cellulose-binding domain (CBD) by a short linker sequence rich in proline and/or hydroxy-amino acids [N. R. Gilkes, et al. (1991) Microbiol Rev, 55: 303-15]. The CBD of a number of fungal cellulases has been shown to consist of 36 amino acid residues, and it is found either at the N-terminal or at the C-terminal extremity of the enzymes. Members of this family possess two disulfide bonds with topology 1-3 2-4. See FIG. 73.

[0846] Motif: qCGGxxxxGxxxCxxgxxCxxxxxxy

[0847] PF00219: Insulin-like growth factor binding protein

[0848] The insulin-like growth factors (IGF-I and IGF-II) bind to specific binding proteins in extracellular fluids with high affinity. Members of this family possess two disulfide bonds with topology 1-3 2-4. See FIG. 74, 75.

[0849] PF00322: Endothelin family

[0850] Endothelins (ET's) are the most potent vasoconstrictors known. These peptides which are 21 residues long contain two intramolecular disulphide bonds with a 1-4 2-3 topology. See FIG. 76.

[0851] PF02058: Guanylin precursor

[0852] Guanylin, a 15-amino-acid peptide, is an endogenous ligand of the intestinal receptor guanylate cyclase-C, known as StaR. These peptides contain two intramolecular disulphide bonds with a 1-3 2-4 topology. See FIG. 77.

[0853] PF02977: Carboxypeptidase inhibitor

[0854] Peptide proteinase inhibitors can be found as single domain proteins or as single or multiple domains within proteins; these are referred to as either simple or compound inhibitors, respectively. In many cases they are synthesised as part of a larger precursor protein, either as a prepropeptide or as an N-terminal domain associated with an inactive peptidase or zymogen. Removal of the N-terminal inhibitor domain either by interaction with a second peptidase or by autocatalytic cleavage activates the zymogen.

[0855] There are 35 known family members. Topology is 1-4 2-5 3-6. See FIG. 80.

[0856] 1) CxxxxxxCxxxxxCxxxCxCxxxxxxC

[0857] 2) CPxixxxCxxdxdCxxxCxCxxxxxxCg

[0858] PF06373: CART

[0859] CART consists mainly of turns and loops (ca. 40 amino acids) spanned by a compact framework composed by a few small stretches of antiparallel beta-sheet common to cystine knots. There are 13 known family members.

[0860] Topology is 1-3 2-5 4-6. See FIG. 81.

[0861] In contrast to all other families, the non-cys residues are rather conserved and this family does not appear to be a preferred choice for randomization.

[0862] Follistatin

[0863] Human Follistatin is an FDA approved product and non-immunogenic and therefore the 70-72AA Follistatin domains are attractive scaffolds. It contains a total of 36 cysteine residues, believed to be arranged into nonoverlapping sets of disulfide bridges corresponding to four autonomous folding units (FIG. 218). The first of these units, which we call Fs0, comprises the 63 N-terminal residues of the mature polypeptide and bears no sequence similarity with any other protein of known structure. In contrast, the rest of the follistatin chain appears to fold into a series of three consecutive 70-74-residue-long Follistatin domains which are structural repeats that are referred to as Fs1, Fs2, and Fs3, which display homology to the follistatin-like domain of the extracellular matrix protein BM-40 and are also found in several other extracellular matrix proteins, such as agrin, tomoregulin, and complement proteins C6 and C7. See FIG. 151. Each 69-72AA Follistatin domain has a DBP of 1-3 2-4 5-9 6-8 7-10.

[0864] PF00713: Hirudin

[0865] The hirudin family is a group of proteinase inhibitors belonging to MEROPS inhibitor family 114, clan IM; they inhibit serine peptidases of the S1 family.

[0866] Hirudin is a potent thrombin inhibitor secreted by the salivary glands of the Hirudinaria manillensis (buffalo leech) and Hirudo medicinalis (medicinal leech). It forms a stable non-covalent complex with alpha-thrombin, thereby abolishing its ability to cleave fibrinogen. The structure of hirudin has been solved by NMR, and the structure of a recombinant hirudin-thrombin complex has been determined by X-ray crystallography to 2.3A. Hirudin consists of an N-terminal globular domain and an extended C-terminal domain. Residues 1-3 form a parallel beta-strand with residues 214-217 of thrombin, the nitrogen atom of residue 1 making a hydrogen bond with the Ser 195 O gamma atom of the catalytic site. The C-terminal domain makes numerous electrostatic interactions with an anion-binding exosite of thrombin, while the last five residues are in a helical loop that forms many hydrophobic contacts. See FIG. 123.

[0867] PF06410: Gurmarin

[0868] Gurmarin is a 35-residue polypeptide from the Asclepiad vine Gymnema sylvestre. It has been utilised as a pharmacological tool in the study of sweet-taste transduction because of its ability to selectively inhibit the neural response to sweet tastants in rats

[0869] There are 2 known family members. Topology is 1-4 2-5 3-6. See FIG. 82.

[0870] 1) CxxxxxxCxxxxxxCCxxxxCxxxxxxxxxC

[0871] 2) CxxxxxxCxxxxxxCCxxxxCxxxxwwxxxC

[0872] PF08027: Albumin-1

[0873] The albumin I protein, a hormone-like peptide, stimulates kinase activity upon binding a membrane bound 43 kDa receptor. The structure of this domain reveals a knottin like fold, comprise of three beta strands. There are 34 known family members. Topology is 1-4 2-5 3-6. See FIGS. 83-84.

[0874] PF08098: Neurotoxin (ATX III)

[0875] This family consists of the Anemonia sulcata toxin III (ATX III) neurotoxin family. ATX III is a neurotoxin that is produced by sea anemone; it adopts a compact structure containing four reverse turns and two other chain reversals, but no regular alpha-helix or beta-sheet. A hydrophobic patch found on the surface of the peptide may constitute part of the sodium channel binding surface. There are 2 known family members. Topology is 1-4 2-5 3-6.

[0876] FIG. 85. Motif: CCxCxxxxxxxxCxxxxxxxxxxC

[0877] PF01147: CHH/MIH/GIH neurohormone

[0878] Arthropods express a family of neuropeptides which include, hyperglycemichormone (CHH), molt-inhibiting hormone (MIH), gonad-inhibiting hormone (GIH) and mandibular organ-inhibiting hormone (MOIH) from crustaceans and ion transport peptide (ITP) from locust.

[0879] There are 131 known family members. Topology is 1-5 2-4 3-6. See FIG. 86.

[0880] PF04736: Eclosion

[0881] Eclosion hormone is an insect neuropeptide that triggers the performance of ecdysis behaviour, which causes shedding of the old cuticle at the end of a molt. There are 5 known family members. Topology is 1-5 2-4 3-6. No structures are available. See FIG. 88.

[0882] 1) CxxxCxxCxxxxxxxxxxxxCxxxCxxxxxxxxxxC

[0883] 2) CxxnCxqCkxmxgxxfxgxxCxxxCxxxxgxxxpxC

[0884] PF01160: Endogenous opioid neuropeptide

[0885] Vertebrate endogenous opioid neuropeptides are released by post-translational proteolytic cleavage of precursor proteins. The precursors consist of the following components: a signal sequence that precedes a conserved region of about 50 residues; a variable-length region; and the sequence of the neuropeptide itself. Sequence analysis reveals that the conserved N-terminal region of the precursors contains 6 cysteines, which are probably involved in disulphide bond formation. It is speculated that this region might be important for neuropeptide processing. There are 50 known family members. Topology is 1-4 2-5 3-6. No structures are available. See FIG. 89.

[0886] 1) CxxxCxxCxxxxxxxxxxxxxxxCxxxCxxxxxxxxxxxxC

[0887] 2) CxxxCxxCxxxxxxxxxxxxxxxCxlxCxxxxxxxxxWxxC

[0888] PF08037: Mollusk pheromone

[0889] This family consists of the attractin family of water-borne pheromone. Mate attraction in Aplysia involves a long-distance water-borne signal in the form of the attractin peptide, that is released during egg laying. These peptides contain 6 conserved cysteines and are folded into 2 antiparallel helices. The second helix contains the IEECKTS sequence conserved in Aplysia attractins. There are 5 known family members. Topology is 1-6 2-5 3-4. FIG. 90.

[0890] 1) CxxxxxxxxCxxxxxxCxxxxxCxxxxxxCxxxxxxxC

[0891] 2) CdxxxxxsxCqrnxxxxCxxaxxCxxxieeCktsxxexC

[0892] PF03913: AMBV Protein

[0893] Amb V is an Ambrosia sp (ragweed) protein. AmbV has been shown to contain a C-terminal helix as the major T cell epitope. Free sulfhydryl groups also play a major role in the T cell recognition of cross-reactivity T cell epitopes within these related allergens

[0894] There are 3 known family members. Topology is 1-7 2-5 3-6 4-8. FIG. 92.

[0895] 1) CxxxxxxCCxxxxxxC(x)xxxxCxxxxxxCxxxC

[0896] 2) CgxxxxyCCxxxgxyC(x)xxxxCyxxxxxCxxxC

[0897] Appendix B: HDD domains containing duplicated motifs

[0898] PF01437: Plexin PSI

[0899] A cysteine rich repeat found in several different extracellular receptors (J. Stamos, et al. (2004) Embo J, 23: 2325-35; J. P. Xiong, et al. (2004) J Biol Chem, 279: 40252-4). The function of the repeat is unknown. Three copies of the repeat are found in Plexin. Two copies of the repeat are found in mahogany protein. A related C. elegans protein contains four copies of the repeat. The Met receptor contains a single copy of the repeat. The Pfam alignment shows 6 highly conserved cysteine residues that may form three conserved disulphide bridges, whereas an additional two cysteines are observed at positions 5 and 7 and may be involved in forming a disulfide bond. Topology is 1-4_{—}2-8_{—}3-6_{—}5-7 (structure 1shy). Semaphorin (structure 1olz) contains only three disulfide bonds with topology 1-4_{—}2-6_{—}3-5. See FIG. 93.

[0900] 1) CxxxxxCxxCxxxxxx(x)xCxxCxxxxxCxxxx(xxxxxx)xCxxxx(xxxxxxxxxx)xxxxxxC

[0901] 2) CxxxxxCxxCxxxxxx(x)xCxWCxxxxxCxxxx(xxxxxx)xCxxxx(xxxxxxxxxx)xxxxxxC

[0902] The loop between Cys7 and Cys8 is very tolerant to insertions. For example, a hybrid domain is inserted between these cysteines in the integrin beta subunit structure (J. P. Xiong, et al. (2004) J Biol Chem, 279: 40252-4) and Cys8 still forms a disulfide bond with Cys2. This can be exploited to insert any sequence after Cys7.

[0903] Design: CxxxxxCxxCxxxxxx(x)xCxxCxxxxxCxxxx(xxxxxx)xCxxxxxxxx(xxxxx)(“anysequence”)C

[0904] This can be used to create multi-plexins:

[0905] First insertion: CxxxxxCxxCxxxxxx(x)xCxxCxxxxxCxxxx(xxxxxx)xCxxxxxxxx(xxxxx)(“PLEX”)C, where PLEX corresponds to CxxxxxCxxCxxxxxx(x)xCxxCxxxxxCxxxx(xxxxxx)xCxxxx(xxxxxxxxxx)xxxxxxC.

[0906] Second insertion: CxxxxxCxxCxxxxxx(x)xCxxCxxxxxCxxxx(xxxxxx)xCxxxxxxxx(xxxxx)(“PLEXIN” (“PLEXIN”))C, where (“PLEXIN” (“PLEXIN”)) corresponds to CxxxxxCxxCxxxxxx(x)xCxxCxxxxxCxxxx(xxxxxx)xCxxxx(xxxxxxxxxx)xxxxxxC inserted into CxxxxxCxxCxxxxxx(x)xCxxCxxxxxCxxxx(xxxxxx)xCxxxxxxxx(xxxxx)(“PLEX”)C after Cys7 of “PLEX”, and multiple following insertions into the inserted plexin sequence, after Cys7.

[0907] PF00088: Trefoil and Large Trefoil

[0908] A cysteine-rich module of approximately 45 amino-acid residues has been found in some extracellular eukaryotic proteins (M. D. Carr, et al. (1994) Proc Natl Acad Sci USA, 91: 2206-10; T. Yamazaki, et al. (2003) Eur J Biochem, 270: 1269-76). Human TFF3 can be expressed at high levels in the E. coli periplasm (15 mg/l culture). The module shows high disulfide density with 3 disulfide bonds per 45 amino acids and a topology of 1-5 2-4 3-6. Large trefoil consists of two adjacent modules linked by an additional disulfide bond with connectivity 1-14 2-6 3-5 4-7 8-12 9-11 10-13. The cysteine spacing between individual cysteines is smaller than 10 and therefore useful for library design. The cysteine positions are highly conserved among different members of this family. See FIGS. 94-95.

[0909] 1) C(x)xxxxxxxxxCxx(x)xxxxxxxCxxxxCCxxxxx(x)xxxxxCx

[0910] 2) C(x)xxxxxxRxxCxx(x)xxxxxxxCxxxxCCfxxxx(x)xxxxwCf

[0911] 3) C(x)xxxxxxRxxCgx(x)xxitxxxCxxxgCC[fwy]dxxx(x)xxxxwC[fy]

[0912] Logo for large trefoil variant with two adjacent modules and an extra 1-14 disulfide linkage:

CxC(x)xxxxxxxxxCxx(x)xxxxxxxCxxxxCCxxxxx(x)xxxxxCxxxxxxxxxxxC(x)xxxxxxxxxCxx(x)xxxxxxxCxxx xCCxxxxx(x)xxxxxCxxxxxxxxC and derivatives.

[0913] FIG. 134 shows the repeated ‘Poly-Trefoil’ structures that can be created from Trefoil motifs.

[0914] PF00090: Thrombospondin 1

[0915] The module is present in the thrombospondin protein where it is repeated 3 times, in a number of proteins involved in the complement pathway as well as extracellular matrix protein. It has been shown to be involved in cell-cell interaction, inhibition of angiogenesis and apoptosis (P. Bork (1993) FEBS Lett, 327: 125-30). See FIG. 96.

[0916] The domain shows high disulfide density with 3 disulfide bonds per approximately 50 amino acids and a topology of 1-5_{—}2-6_{—}3-4 (T. M. Misenheimer, et al. (2005) J Biol Chem), The cysteine spacing between individual cysteines is smaller than 10 and therefore useful for library design. The cysteine positions are conserved among different members of this family.

[0917] CxxxCxxxxxxxxxxcxxxx(xxx)xxxxxCxxxxxx(xxx)xxxC(x)xxxxC

[0918] CxxxCxxGxxxRxxxcxxxx(Pxxx)xxxxxCxxxxxx(xxx)xxxC(x)xxxxC

[0919] CsvtCgxGxxxRxrxcxxxx(Pxxx)xxxxxCxxxxxx(xxx)xxxC(x)xxxxC

[0920] PF00228: Bowman Birk inhibitor

[0921] The Bowman-Birk inhibitor family is one of the numerous families of serine proteinase inhibitors. They have a duplicated structure and generally possess two distinct inhibitory sites. These inhibitors are primarily found in plants and in particular in the seeds of legumes as well as in cereal grains (R. F. Qi, et al. (2005) Acta Biochim Biophys Sin (Shanghai), 37: 283-92).

[0922] There are two different classes: 1) domains with 14 cysteines and the topology 1-14 2-6 3-13, 4-5 7-9 8-12 10-11 or domains with 10 cysteines and the topology 1-10 2-5 3-4 6-8 7-9. Due to these subfamilies, Cys positions in logo do not seem to be well conserved although they are for each subfamily.

[0923] The domain shows high disulfide density with 5 or 7 disulfide bonds per approximately 50 amino acids. The cysteine spacing between individual cysteines is smaller than 10 and therefore useful for library design. The cysteine positions are highly conserved among different members of this family. See FIGS. 97-98.

[0924] PF00184: Neurohypophysial hormones, C-terminal Domain

[0925] The nonapeptide hormones vasopressin and oxytocin are found in high concentrations in neurosecretory granules complexed in a 1:1 ratio with a class of disulfide-rich proteins known as neurophysins. Two closely related classes of NPs have been identified, one complexed with vasopressin and the other with oxytocin [L. Q. Chen, et al. (1991) Proc Natl Acad Sci USA, 88: 4240-4]. There are 75 members of this family and the cysteine positions are highly conserved. The cysteine-rich module is duplicated in the logo. See FIG. 99.

[0926] Both modules have homologous disulfide topology. One disulfide connects the two modules through Cys1 and Cys8. If this disulfide bond is ignored, disulfide topology for each module is 1-3, 2-6, 4-5. See FIG. 100.

[0927] The crystal structure of neurophysin revealed that one monomer consists of two homologous layers, each with four antiparallel beta-strands. The two regions are connected by a helix followed by a long loop. Monomer-monomer contacts involve antiparallel beta-sheet interactions, which form a dimer with two layers of eight beta-strands.

[0928] PF00200: Extendable and dimeric disintegrins

[0929] Disintegrins are peptides of about 50-80 amino acid residues that contain many cysteines all involved in disulphide bonds. Disintegrins contain an Arg-Gly-Asp (RGD) sequence, a recognition site of many adhesion proteins. The RGD sequence of disintegrins is postulated to interact with the glycoprotein IIb-IIIa complex.

[0930] Disintegrins are grouped according to length and cysteine content (J. J. Calvete, et al. (2005) Toxicon, 45: 1063-74).

[0931] Small: CxxxxCCxxCxxxxxxxxCxxxxxxxxx(xx)CxxxxCxC with 4SS and disulfide topology 1-4 2-6 3-7 5-8.

[0932] Medium: xCxxxxxxCCxxxxCxxxx(x)xxxCx(xxx)xxxCCxxCxxxxxxxxCxxxxxxxxxxxCxxxxxxxC

[0933] with 6SS and disulfide topology 1-5, 2-4, 3-8, 6-8, 7-11, 10-12.

[0934] Long:

[0935] xxxxxxxxxxCxCxxxxCxxxCCxxxxCxxxx(x)xxxCx(xxx)xxxCCxxCxxxxxxxxCxxxxxxxxxxxCxxxxxxxC with 7SS and disulfide topology 1-4, 2-7, 3-6, 5-11, 8-10, 9-13, 12-14

[0936] Dimeric: CCxxxxCxxxx(x)xxxCx(xxx)xxxCCxxCxxxxxxxxCxxxxxxxxxxxCxxxxxxxC with 4SS and disulfide topology 1-7,4-6, 5-10, 8-10 and two intermolecular SS involving Cys2 and Cys3 to yield dimeric integrins. See FIGS. 101 and 157. Evolutionary relationship between these different groups has been found, which is characterized by the loss/addition of disulfide bonds. Thus, this motif can be extended during in vitro evolution.

[0937] Appendix C: Scaffolds with highly repeated motifs

[0938] Cysteine-Rich Repeat Proteins (CRRPs)

[0939] PF00396: Granulin

[0940] Granulins are a family of cysteine-rich peptides of about 6 Kd which may have multiple biological activities (A. Bateman, et al. (1998) J Endocrinol, 158: 145-51). A precursor protein (known as acrogranin, for sequence see below) potentially encodes seven different forms of granulin (grnA to grnG) which are probably released by post-translational proteolytic processing. Granulins are evolutionary related to a PMP-D1, a peptide extracted from the pars intercerebralis of migratory locusts. See FIG. 103. Granulin spacing: CxxxxxxCxxxxxCCxxxxxxxxCCxxxxxxCCxxxxxCCxxxxxCxxxxxxCxx DBP: 1-3_{—}2-5_{—}4-7_{—}6-9_{—}8-11_{—}10-12

[0941] Design to expand the size (capping motif underlined; 1 repeat in italic, 1 repeat bold):

[0942] 3C6C5CC8CC6CC5CC5CC8CC6CC5CC5C6C2

[0943] Design to introduce kinks: 3C6C5CCₐ4G3CC_{b}P5CC_{c}2G2CC_{d}P4C6C2

[0944] The natural 8-6-5-5 pattern or the more regular 5-5-5-5 pattern can be used. Since the structure has beta-sheets, one approach is to favor amino acids that are good beta-sheet formers and to avoid amino acids that are not beta-sheet formers. The following amino acids are preferred and can be obtained with mixed codons: valine, isoleucine, phenylalanine, tyrosine, tryptophan and threonine. FIG. 125 shows the Granulin structure.

[0945] Design assuming 5AA random loops:

3C6C5CC5CC5CC5CC5CC5CC5CC5CC5C6C2

[0946] Minimum starter protein has only two endcaps:

[0947] C6C5C6C (17 random AA)

[0948] Add minimum unit increase:

C6C5CC5C6C

[0949] Process steps: make library, pan, add randomized 5CC5 unit, pan, add 5CC5 unit, etc.

[0950] PF02420: Antifreeze Protein

[0951] Antifreeze protein is an 8 kDa protein forming a beta-helical structure (M. E. Daley, et al. (2002) Biochemistry, 41: 5515-25). An N-terminal capping motif is formed by a microprotein domain and 1-3 2-5 4-6 topology. Repeating units of 2C5C3 with disulfide connectivity 1-2 are added to this motif. Threonine is conserved because it is involved in ice binding, but can be omitted for design. Serine and Alanine are conserved because only small side chains fit inside the helix. The complete absence of a hydrophobic core is remarkable. FIG. 104 shows some Antifreeze-derived repeat proteins. FIG. 104 shows some motifs. See FIG. 127.

[0952] Natural sequence:

QCTGGADCTSCTGACTGCGNCPNA(VTCTNSQHCVKA)(NTCTGSTDCNT
A)(QTCTNSKDCFEA)(NTCTDSTNCYKA)(TACTNSSGCPGH)

[0953] The repeats are more clear when shown like this:

QCTGGADCTSCTGACTGCGNCPNA
(VTCTNSQHCVKA)
(NTCTGSTDCNTA)
(QTCTNSKDCFEA)
(NTCTDSTNCYKA)
(TACTNSSGCPGH)

[0954] Different designs (capping domain underlined; repeat italic):

1) 1C5C2C3C2C2C3(2C5C3)ₙ
2) 1C5C2C3C2C2C3(xtCxxxxCxxa)ₙ
3) QCTGGA(DCTSCTGACTGCG)(DCTSCTGACTGCG)ₙ
4) QCTGGA(DCTSCTGACTGCGA)(DCTSCTGACTGCGA)ₙ

[0955] PF00757: Furin-like domain

[0956] The furin-like cysteine rich region has been found in a variety of proteins from eukaryotes that are involved in the mechanism of signal transduction by receptor tyrosine kinases, which involves receptor aggregation. See FIG. 105.

[0957] A subset of the logo folds into a spiral-shaped repeat and is used as a scaffold for library design:

[0958] CxxxCxxxCxxxxxxCCxxxCxxxCxxxxxxxC. The topology of this motif is 1-3_{—}2-4_{—}5-7_{—}6-8. Members of this family show high conservation in their cysteine positions and spacing. This repeat can be extended by adding (CxxxCxxxCxxxxxxxC)ₙ to the C-terminus of the above motif.

[0959] PF03128: CxCxCx

[0960] This repeat contains the conserved pattern CXCXC where X can be any amino acid. The repeat is found in up to five copies in Vascular endothelial growth factor C. In the salivary glands of the dipteran Chironomus tentans, a specific messenger ribonucleoprotein (mRNP) particle, the Balbiani ring (BR) granule, can be visualized during its assembly on the gene and during its nucleocytoplasmic transport. This repeat is found over 70 copies in the balbiani ring protein 3 (see below). It is also found in some silk proteins.

[0961] The CXCXC repeat does not form disulfide bonds internally, as such a loop would only span three amino acids and no microprotein in the database has a cysteine span of 3. As shown in FIG. 109, cysteines in the CxCxCx motif are involved in the formation of a true repeat with disulfides linking different copies of the repeat. A single cysteine is typically found between CxCxCx repeats (conserved in logo, but position may vary). FIG. 106, 107, 108.

[0962] Actual: C10C1C1C8C10C1C1C8C10C1C1C3C10C1C1C6C11C

[0963] Abstracted, with beginning and end: C1C8C10C1C1C8C10C1C1C8C10C1

[0964] A model of disulfide bonded structure is show in FIG. 109.

[0965] PF05444: DUF753

[0966] Sequences which are repeated in several domains of unknown function in Drosophila.

[0967] FIG. 110.

[0968] PF01508: Paramecium

[0969] Surface antigen containing 37 copies of the above repeat. Structural role suggested. Secondary structure prediction suggests absence of alpha helices and presence of beta sheet structures. (don't know how this was done, presence of disulfides may interfere with prediction). FIGS. 111-112.

[0970] PF00526: Dicty

[0971] Several Dictyostelium species have proteins that contain conserved repeats. These proteins have been variously described as extracellular matrix protein B′, cyclic nucleotide phosphodiesterase inhibitor precursor′, prestalk protein precursor′, ‘putative calmodulin-binding protein CamBP64’, and cysteine-rich, acidic integral membrane protein precursor′ as well as ‘hypothetical protein’. See FIG. 113.

[0972] PF03860: DUF326

[0973] This family is a small cysteine-rich repeat. The cysteines mostly follow a CxxCxxxCxxCxxxCxxC pattern, though they often appear at other positions in the repeat as well. See FIG. 114.

[0974] PF02363: Cysteine-rich repeat

[0975] This Cysteine repeat CxxxCxxxCxxxC is repeated in sequences of this family, 34 times in O17970_CAEEL. The function of these repeats is unknown as is the function of the proteins in which they occur. Most of the sequences in this family are from C. elegans.

[0976] See FIG. 115-116.

| | Scaf- | | Randomiza- | Diver- | | |
|---|---|---|---|---|---|---|
| Name | fold | Cys | tion | sity | Size | Quality, % |
| LMP0020 | CB | 8 | 29 AA | 1027 | 2.6 × 107 | 78 |
| LMP0021 | CB | 8 | 29 AA | 1027 | 6.3 × 109 | 65 |
| LMS0040 | CB | 8 | 16 AA | 1019 | 2.9 × 108 | 77 |
| LMS0041 | CB | 8 | 16 AA | 1014 | na | Designed |
| LMP0040 | TF | 8 | 4 × 7 AA | 109 | na | Designed |
| LMB0030 | PL | 8 | 13 AA | 1012 | na | Designed |
| LMP0030 | PL | 8 | 8 AA | 109 | na | Designed |
| LMP0010 | TB | 6 | 23 AA | 1027 | 7.6 × 108 | 87 |
| LMS0043 | TB | 6 | 14 AA | 1018 | 5.1 × 109 | 92 |
| LMS0044 | TB | 6 | 14 AA | 1013 | 1.0 × 109 | 96 |
| LMB0020 | TI | 6 | 10 AA | 1012 | 2.4 × 109 | 92 |
| LMB0010 | BC | 4 | 12 AA | 1014 | na | Designed |
| LMP0050 | BC | 4 | 8 AA | 109 | 7.9 × 108 | 100 |

### REFERENCES

[0977] Artavanis-Tsokanas, S et al. (1995) Science 268:225-232.
[0978] Aster, J C et al. (1999) Biochemistry 38:4736.
[0979] Bensch K W et al. (1995) FEBS Lett 368:331-335.
[0980] Bork, P (1993) FEBS Lett 327:125-30
[0981] Carr, M D et al. (1994) PNAS 91:2206-2210.
[0982] Chirino A J, Ary M L, Marshall S A. (2004) Minimizing the immunogenicity of protein therapeutics. Drug Discovery Today 9:82-90
[0983] Chong J M et al. (2001) J. Biol. Chem. 277:5134-5144.
[0984] Chong, J M and Speicher, D W (2001) J. Biol. Chem. 276:5804-5813.
[0985] Conticello S G, Gilad Y, Avidan N, Ben-Asher E, Levy Z, Fainzilber M. (2001) Mechanisms for evolving hypervariability: the case of conopeptides. Mol Biol Evol. 18:120-31.
[0986] Cornet B et al. (1995) Structure 3:435-448.
[0987] DeA, et al. (1994) PNAS 91:1084-1088
[0988] Dufton M J (1984) J. Mol. Evol. 20:128-134.
[0989] Fajloun, Z et al. (2000) J. Biol. Chem. 275:39394-402.
[0990] Fitzgerald, K et al. (1995) Development 121:4275-82.
[0991] Gray W R et al. (1988) Annu Rev Biochem 57:665-700.
[0992] Guncar G et al. (1999) EMBO J. 18:793-803.
[0993] Hermeling S, Crommelin D J, Schellekens H, Jiskoot W. (2004) Structure-immunogenicity relationships of therapeutic proteins. Pharm Res. 21, 897-903
[0994] Higgins, J M et al. (1995) J. Immunol. 155:5777-85
[0995] Hoffman, W et al. (1993) Trends Biochem Sci 18:239-243.
[0996] Hugli, T E (1990) Curr Topics Microbiol Immunol. 153:181-208.
[0997] Jonassen I et al. (1995) Protein Sci 4:1587-1595.
[0998] Karrikubo, Y et al. (2004)
[0999] Kim, J I et al. (1995) J. Mol. Biol. 250:659-671.
[1000] Kimble, J et al. (1997) Annu Rev Cell Dev Biol 13:333-361.
[1001] Koduri, V & Blacklow, S C (2001) 40:12801
[1002] Lauber, T. et al. (2003) J. Mol. Biol. 328:205-219.
[1003] Léonetti et al. (1998) J Immunol, 160; 3820-3827 (1998)
[1004] Léonetti M, That R, Cotton J, Leroy S, Drevet P, Ducancel F, Boulain J C, Ménez A. (1998) Increasing immunogenicity of antigens fused to Ig-binding proteins by cell surface targeting. J. Immunol., 160; 3820-3827.
[1005] Leung-Hagesteijn, C et al. (1992) Cell 71:289-99
[1006] Liu L et al. (1997) Genomics 43:316-320.
[1007] Maillére B, Mourier G, Hervé M, Cotton J, Leroy S, Ménez A. (1995) Immunogenicity of a disulphide-containing neurotoxin: presentation to T-cells requires a reduction step. Toxicon, 4, 475-482; Maillére B. et al., unpublished data.
[1008] Maillére, B., Cotton, J., Mourier, G., Léonetti, M., Leroy, S. and Ménez, A. (1993). Role of thiols in the presentation of a snake toxin to murine T cells. J. Immunol. 150:5270-5280.
[1009] Martin L, Stricher F, Misse D, Sironi F, Pugniere M, Barthe P, Prado-Gotor R, Freulon I, Magne X, Roumestand C, Ménez A, Lusso P, Veas F, Vita C (2003) Rational design of a CD4 mimic that inhibits HIV-1 entry and exposes cryptic neutralization epitopes. Nat. Biotechnol. 21:71-6.
[1010] Ménez, A. (1991) Immunology of snake toxins, p. 35-90. In: Snake Toxins. AL Harvey (Ed), Pergamon Press, Inc., New York.
[1011] Miljanich, G, P. (2004), Ziconotide: neuronal calcium channel blocker for treating severe chronic pain. Curr. Med. Chem. 23, 3029.
[1012] Misenheimer, T M et al. (2001) J. Biol. Chem. 276:45882
[1013] Molina F et al (1996) Eur. J. Biochem. 240:125-133.
[1014] Mourier et al., (1995) Toxicon 4:475-482.
[1015] Nielsen, K J et al. (2002) J. Biol. Chem.277:27247-27255.
[1016] Pallaghy P K et al. (1993) J Mol Biol 234:405-420.
[1017] Pallaghy, P et al. Protein Sci 3:1833 (1994)
[1018] Pan, T C et al. (1993) J. Cell. Biol. 123: 1269-1277
[1019] Patten, P. A. and Schellekens, H. (2003) The immunogenicity of Biopharmaceuticals. In: Immunogenicity of Therapeutic Biological Products. Brown, F. and Mire-Sluis, A. R. (eds). Dev. Biol. Basel, Karger, 112:81-97.
[1020] Pereira, C. M., Guth, B. E. C, Sbrogio-Almeida, M. E. and Castilho, B. A. (2001) Microbiology 147:861-867.
[1021] Petersen, S V et al. (2003) Proc. Natl. Acad. Sci. USA 100:13875-80.
[1022] Rebayl, et al. (1991) Cell 67:687-699
[1023] Roszmusz, E. et al. (2002) BBRC296:156
[1024] Sands, B E & Podolsky, D K (1996) Annu. Rev. Physiol. 58:253-273.
[1025] Schultz-Chemy, S et al. (1995) J. Biol. Chem. 270:7304-7310
[1026] Schultz-Chemy, S et al. J. (1994) J. Biol. Chem. 269:26783-8
[1027] Schulz A. et al. (2005) Biopolymers 80:34-49.
[1028] Singh H, Raghava G P (2001) ProPred: prediction of HLA-DR binding sites. Bioinformatics 17: 1236-7.
[1029] Skinner W S et al., J. Biol. Chem. (1989) 264:2150-2155.
[1030] So, T., Ito, H., Hirata, M., Ueda, T. and Imoto, T. (2001) Contribution of conformational stability of hen lysozyme to induction of type 2 T-helper immune responses. Immunology 104:259-268.
[1031] Sturniolo, T., et al. (1999) Generation of tissue-specific and promiscuous HLA ligand databases using DNA microarrays and virtual HLA class II matrices. Nature Biotechnol, 17: 555
[1032] Tam, J P and Lu, Y A. Protein Sci. 7:1583 (1998)
[1033] Tax, F E et al. (1994) Nature 368:150-154.
[1034] Thai R, Moine G, Desmadril M, Servent D, Tarride J L, Ménez A, Léonetti M. (2004) Antigen stability controls antigen presentation. J. Biol. Chem. 279, 50257-50266.
[1035] Van den Hooven, H W et al. (2001) Biochemistry 40:3458-3466.
[1036] van Vlijmen H W, Gupta A, Narasimhan S, Singh J (2004). A novel database of disulfide patterns and its application to the discovery of distantly related homologs. J Mol Biol 335: 1083-92.
[1037] Vardar, D et al. (2003) Biochemistry 42:7061
[1038] White, C E et al. (1996) PNAS 93:10177.
[1039] Xu Y et al. (2000) Biochemistry 39:13669-13675.
[1040] Zaffarella G C et al. (1988) Biochemistry 27:7102-7105.
[1041] Zhu S et al. (1999) FEBS Lett 457:509-514.
[1042] Zuiderweg, E R et al. (1989) Biochemistry 28:172-85.

The application's sequence listing, which the Patent Office published only in electronic form, follows.

SEQUENCE LISTING (576 sequences)

SEQ ID NO: 1 - protein, 4 aa, Artificial Sequence
  Description of Artificial Sequence: Synthetic amino acid sequence
GGGS

SEQ ID NO: 2 - protein, 30 aa, Artificial Sequence
  Description of Artificial Sequence: Synthetic amino acid sequence
  MOD_RES (2)..(2): Variable amino acid
  MOD_RES (5)..(7): Variable amino acid
  MOD_RES (9)..(12): Variable amino acid
  MOD_RES (16)..(18): Variable amino acid
  MOD_RES (20)..(20): Variable amino acid
  MOD_RES (24)..(28): Variable amino acid
CXPHXXXCXXXXDCCXXXCXRRGXXXXXRC

SEQ ID NO: 3 - protein, 30 aa, Artificial Sequence
  Description of Artificial Sequence: Synthetic amino acid sequence
  MOD_RES (2)..(2): Variable amino acid
  MOD_RES (4)..(7): Variable amino acid
  MOD_RES (9)..(13): Variable amino acid
  MOD_RES (16)..(18): Variable amino acid
  MOD_RES (20)..(23): Variable amino acid
  MOD_RES (25)..(29): Variable amino acid
CXPXXXXCXXXXXCCXXXCXXXXGXXXXXC

SEQ ID NO: 4 - protein, 30 aa, Artificial Sequence
  Description of Artificial Sequence: Synthetic amino acid sequence
  MOD_RES (2)..(7): Variable amino acid
  MOD_RES (9)..(13): Variable amino acid
  MOD_RES (16)..(18): Variable amino acid
  MOD_RES (20)..(29): Variable amino acid
CXXXXXXCXXXXXCCXXXCXXXXXXXXXXC

SEQ ID NO: 5 - protein, 11 aa, Artificial Sequence
  Description of Artificial Sequence: Synthetic amino acid sequence
  MOD_RES (5)..(6): Variable amino acid
FCCPXXRYCCW

SEQ ID NO: 6 - protein, 10 aa, Artificial Sequence
  Description of Artificial Sequence: Synthetic amino acid sequence
  MOD_RES (4)..(7): Variable amino acid
CCPXXXXCCW

SEQ ID NO: 7 - protein, 9 aa, Artificial Sequence
  Description of Artificial Sequence: Synthetic amino acid sequence
  MOD_RES (3)..(7): Variable amino acid
CCXXXXXCC

SEQ ID NO: 8 - protein, 25 aa, Artificial Sequence
  Description of Artificial Sequence: Synthetic amino acid sequence
  MOD_RES (2)..(4): Variable amino acid
  MOD_RES (7)..(7): Variable amino acid
  MOD_RES (9)..(13): Variable amino acid
  MOD_RES (18)..(19): Variable amino acid
  MOD_RES (21)..(22): Variable amino acid
  MOD_RES (24)..(24): Variable amino acid
CXXXFWXCXXXXXCCGWXXCXXGXC

SEQ ID NO: 9 - protein, 25 aa, Artificial Sequence
  Description of Artificial Sequence: Synthetic amino acid sequence
  MOD_RES (2)..(5): Variable amino acid
  MOD_RES (7)..(7): Variable amino acid
  MOD_RES (9)..(13): Variable amino acid
  MOD_RES (16)..(16): Variable amino acid
  MOD_RES (18)..(19): Variable amino acid
  MOD_RES (21)..(24): Variable amino acid
CXXXXWXCXXXXXCCXWXXCXXXXC

SEQ ID NO: 10 - protein, 25 aa, Artificial Sequence
  Description of Artificial Sequence: Synthetic amino acid sequence
  MOD_RES (2)..(7): Variable amino acid
  MOD_RES (9)..(13): Variable amino acid
  MOD_RES (16)..(19): Variable amino acid
  MOD_RES (21)..(24): Variable amino acid
CXXXXXXCXXXXXCCXXXXCXXXXC

SEQ ID NO: 11 - protein, 37 aa, Artificial Sequence
  Description of Artificial Sequence: Synthetic amino acid sequence
  MOD_RES (2)..(2): Variable amino acid
  MOD_RES (6)..(7): Variable amino acid
  MOD_RES (9)..(12): Variable amino acid
  MOD_RES (16)..(22): Variable amino acid
  MOD_RES (24)..(27): Variable amino acid
  MOD_RES (33)..(35): Variable amino acid
CXGYDXXCXXXXPCCXXXXXXXCXXXXGYWWYXXXYC

SEQ ID NO: 12 - protein, 37 aa, Artificial Sequence
  Description of Artificial Sequence: Synthetic amino acid sequence
  MOD_RES (2)..(7): Variable amino acid
  MOD_RES (9)..(13): Variable amino acid
  MOD_RES (16)..(22): Variable amino acid
  MOD_RES (24)..(29): Variable amino acid
  MOD_RES (32)..(36): Variable amino acid
CXXXXXXCXXXXXCCXXXXXXXCXXXXXXWWXXXXXC

SEQ ID NO: 13 - protein, 37 aa, Artificial Sequence
  Description of Artificial Sequence: Synthetic amino acid sequence
  MOD_RES (2)..(7): Variable amino acid
  MOD_RES (9)..(13): Variable amino acid
  MOD_RES (16)..(22): Variable amino acid
  MOD_RES (24)..(36): Variable amino acid
CXXXXXXCXXXXXCCXXXXXXXCXXXXXXXXXXXXXC

SEQ ID NO: 14 - protein, 44 aa, Artificial Sequence
  Description of Artificial Sequence: Synthetic amino acid sequence
  MOD_RES (2)..(2): Variable amino acid
  MOD_RES (4)..(4): Variable amino acid
  MOD_RES (6)..(10): Variable amino acid
  MOD_RES (12)..(13): Variable amino acid
  MOD_RES (16)..(32): Variable amino acid
  MOD_RES (34)..(34): Variable amino acid
  MOD_RES (38)..(38): Variable amino acid
  MOD_RES (40)..(43): Variable amino acid
CXFXCXXXXXGXXPCXXXXXXXXXXXXXXXXXCXGGWXCXXXXC

SEQ ID NO: 15 - protein, 44 aa, Artificial Sequence
  Description of Artificial Sequence: Synthetic amino acid sequence
  MOD_RES (2)..(4): Variable amino acid
  MOD_RES (6)..(14): Variable amino acid
  MOD_RES (16)..(32): Variable amino acid
  MOD_RES (34)..(36): Variable amino acid
  MOD_RES (38)..(38): Variable amino acid
  MOD_RES (40)..(43): Variable amino acid
CXXXCXXXXXXXXXCXXXXXXXXXXXXXXXXXCXXXWXCXXXXC

SEQ ID NO: 16 - protein, 44 aa, Artificial Sequence
  Description of Artificial Sequence: Synthetic amino acid sequence
  MOD_RES (2)..(4): Variable amino acid
  MOD_RES (6)..(14): Variable amino acid
  MOD_RES (16)..(32): Variable amino acid
  MOD_RES (34)..(38): Variable amino acid
  MOD_RES (40)..(43): Variable amino acid
CXXXCXXXXXXXXXCXXXXXXXXXXXXXXXXXCXXXXXCXXXXC

SEQ ID NO: 17 - protein, 35 aa, Artificial Sequence
  Description of Artificial Sequence: Synthetic amino acid sequence
  MOD_RES (2)..(7): Variable amino acid
  MOD_RES (9)..(10): Variable amino acid
  MOD_RES (12)..(13): Variable amino acid
  MOD_RES (16)..(18): Variable amino acid
  MOD_RES (20)..(21): Variable amino acid
  MOD_RES (23)..(23): Variable amino acid
  MOD_RES (25)..(29): Variable amino acid
  MOD_RES (31)..(33): Variable amino acid
CXXXXXXCXXHXXCCXXXCXXGXCXXXXXWXXXGC

SEQ ID NO: 18 - protein, 35 aa, Artificial Sequence
  Description of Artificial Sequence: Synthetic amino acid sequence
  MOD_RES (2)..(7): Variable amino acid
  MOD_RES (9)..(10): Variable amino acid
  MOD_RES (12)..(13): Variable amino acid
  MOD_RES (16)..(18): Variable amino acid
  MOD_RES (20)..(23): Variable amino acid
  MOD_RES (25)..(34): Variable amino acid
CXXXXXXCXXHXXCCXXXCXXXXCXXXXXXXXXXC

SEQ ID NO: 19 - protein, 35 aa, Artificial Sequence
  Description of Artificial Sequence: Synthetic amino acid sequence
  MOD_RES (2)..(7): Variable amino acid
  MOD_RES (9)..(13): Variable amino acid
  MOD_RES (16)..(18): Variable amino acid
  MOD_RES (20)..(23): Variable amino acid
  MOD_RES (25)..(34): Variable amino acid
CXXXXXXCXXXXXCCXXXCXXXXCXXXXXXXXXXC

SEQ ID NO: 20 - protein, 28 aa, Artificial Sequence
  Description of Artificial Sequence: Synthetic amino acid sequence
  MOD_RES (2)..(4): Variable amino acid
  MOD_RES (6)..(7): Variable amino acid
  MOD_RES (9)..(10): Variable amino acid
  MOD_RES (13)..(13): Variable amino acid
  MOD_RES (16)..(16): Variable amino acid
  MOD_RES (18)..(18): Variable amino acid
  MOD_RES (20)..(22): Variable amino acid
  MOD_RES (24)..(24): Variable amino acid
  MOD_RES (26)..(27): Variable amino acid
CXXXGXXCXXDGXCCXGXCXXXFXGXXC

SEQ ID NO: 21 - protein, 28 aa, Artificial Sequence
  Description of Artificial Sequence: Synthetic amino acid sequence
  MOD_RES (2)..(7): Variable amino acid
  MOD_RES (9)..(13): Variable amino acid
  MOD_RES (16)..(18): Variable amino acid
  MOD_RES (20)..(27): Variable amino acid
CXXXXXXCXXXXXCCXXXCXXXXXXXXC

SEQ ID NO: 22 - protein, 28 aa, Artificial Sequence
  Description of Artificial Sequence: Synthetic amino acid sequence
  MOD_RES (2)..(2): Variable amino acid
  MOD_RES (4)..(5): Variable amino acid
  MOD_RES (7)..(8): Variable amino acid
  MOD_RES (11)..(11): Variable amino acid
  MOD_RES (13)..(14): Variable amino acid
  MOD_RES (16)..(17): Variable amino acid
  MOD_RES (19)..(19): Variable amino acid
  MOD_RES (24)..(25): Variable amino acid
  MOD_RES (27)..(27): Variable amino acid
CXDXXCXXYCXGXXYXXGXCDGPXXCXC

SEQ ID NO: 23 - protein, 28 aa, Artificial Sequence
  Description of Artificial Sequence: Synthetic amino acid sequence
  MOD_RES (2)..(5): Variable amino acid
  MOD_RES (7)..(9): Variable amino acid
  MOD_RES (11)..(19): Variable amino acid
  MOD_RES (21)..(25): Variable amino acid
  MOD_RES (27)..(27): Variable amino acid
CXXXXCXXXCXXXXXXXXXCXXXXXCXC

SEQ ID NO: 24 - protein, 32 aa, Artificial Sequence
  Description of Artificial Sequence: Synthetic amino acid sequence
  MOD_RES (4)..(5): Variable amino acid
  MOD_RES (7)..(8): Variable amino acid
  MOD_RES (13)..(14): Variable amino acid
  MOD_RES (17)..(17): Variable amino acid
  MOD_RES (20)..(20): Variable amino acid
  MOD_RES (22)..(26): Variable amino acid
  MOD_RES (28)..(29): Variable amino acid
  MOD_RES (31)..(31): Variable amino acid
CHFXXCXXDCRRXXPGXYGXCXXXXXGXXCXC

SEQ ID NO: 25 - protein, 32 aa, Artificial Sequence
  Description of Artificial Sequence: Synthetic amino acid sequence
  MOD_RES (2)..(5): Variable amino acid
  MOD_RES (7)..(9): Variable amino acid
  MOD_RES (11)..(14): Variable amino acid
  MOD_RES (17)..(18): Variable amino acid
  MOD_RES (20)..(20): Variable amino acid
  MOD_RES (22)..(26): Variable amino acid
  MOD_RES (28)..(29): Variable amino acid
  MOD_RES (31)..(31): Variable amino acid
CXXXXCXXXCXXXXPGXXGXCXXXXXGXXCXC

SEQ ID NO: 26 - protein, 32 aa, Artificial Sequence
  Description of Artificial Sequence: Synthetic amino acid sequence
  MOD_RES (2)..(5): Variable amino acid
  MOD_RES (7)..(9): Variable amino acid
  MOD_RES (11)..(20): Variable amino acid
  MOD_RES (22)..(29): Variable amino acid
  MOD_RES (31)..(31): Variable amino acid
CXXXXCXXXCXXXXXXXXXXCXXXXXXXXCXC

SEQ ID NO: 27 - protein, 64 aa, Artificial Sequence
  Description of Artificial Sequence: Synthetic amino acid sequence
  MOD_RES (3)..(4): Variable amino acid
  MOD_RES (6)..(7): Variable amino acid
  MOD_RES (9)..(9): Variable amino acid
  MOD_RES (11)..(12): Variable amino acid that may or may not be present
  MOD_RES (13)..(16): Variable amino acid
  MOD_RES (18)..(18): Variable amino acid
  MOD_RES (21)..(24): Variable amino acid
  MOD_RES (27)..(27): Variable amino acid
  MOD_RES (29)..(31): Variable amino acid
  MOD_RES (32)..(34): Variable amino acid that may or may not be present
  MOD_RES (37)..(37): Variable amino acid that may or may not be present
  MOD_RES (38)..(41): Variable amino acid
  MOD_RES (43)..(43): Variable amino acid
  MOD_RES (45)..(45): Variable amino acid that may or may not be present
  MOD_RES (46)..(50): Variable amino acid
  MOD_RES (52)..(57): Variable amino acid
  MOD_RES (58)..(58): Variable amino acid that may or may not be present
  MOD_RES (59)..(63): Variable amino acid
CIXXGXXCXGXXXXXXCXCCXXXXYCXCXXXXXXFGXXXXXCXCXXXXXXCXXXXXXXXXXXXC

SEQ ID NO: 28 - protein, 64 aa, Artificial Sequence
  Description of Artificial Sequence: Synthetic amino acid sequence
  MOD_RES (2)..(7): Variable amino acid
  MOD_RES (9)..(9): Variable amino acid
  MOD_RES (11)..(12): Variable amino acid that may or may not be present
  MOD_RES (13)..(16): Variable amino acid
  MOD_RES (18)..(18): Variable amino acid
  MOD_RES (21)..(25): Variable amino acid
  MOD_RES (27)..(27): Variable amino acid
  MOD_RES (29)..(31): Variable amino acid
  MOD_RES (32)..(34): Variable amino acid that may or may not be present
  MOD_RES (37)..(37): Variable amino acid that may or may not be present
  MOD_RES (38)..(41): Variable amino acid
  MOD_RES (43)..(43): Variable amino acid
  MOD_RES (45)..(45): Variable amino acid that may or may not be present
  MOD_RES (46)..(50): Variable amino acid
  MOD_RES (52)..(57): Variable amino acid
  MOD_RES (58)..(58): Variable amino acid that may or may not be present
  MOD_RES (59)..(63): Variable amino acid
CXXXXXXCXGXXXXXXCXCCXXXXXCXCXXXXXXFGXXXXXCXCXXXXXXCXXXXXXXXXXXXC

SEQ ID NO: 29 - protein, 64 aa, Artificial Sequence
  Description of Artificial Sequence: Synthetic amino acid sequence
  MOD_RES (2)..(7): Variable amino acid
  MOD_RES (9)..(10): Variable amino acid
  MOD_RES (11)..(12): Variable amino acid that may or may not be present
  MOD_RES (13)..(16): Variable amino acid
  MOD_RES (18)..(18): Variable amino acid
  MOD_RES (21)..(25): Variable amino acid
  MOD_RES (27)..(27): Variable amino acid
  MOD_RES (29)..(31): Variable amino acid
  MOD_RES (32)..(34): Variable amino acid that may or may not be present
  MOD_RES (35)..(36): Variable amino acid
  MOD_RES (37)..(37): Variable amino acid that may or may not be present
  MOD_RES (38)..(41): Variable amino acid
  MOD_RES (43)..(43): Variable amino acid
  MOD_RES (45)..(45): Variable amino acid that may or may not be present
  MOD_RES (46)..(50): Variable amino acid
  MOD_RES (52)..(57): Variable amino acid
  MOD_RES (58)..(58): Variable amino acid that may or may not be present
  MOD_RES (59)..(63): Variable amino acid
CXXXXXXCXXXXXXXXCXCCXXXXXCXCXXXXXXXXXXXXXCXCXXXXXXCXXXXXXXXXXXXC

SEQ ID NO: 30 - protein, 34 aa, Artificial Sequence
  Description of Artificial Sequence: Synthetic amino acid sequence
  MOD_RES (2)..(2): Variable amino acid
  MOD_RES (8)..(14): Variable amino acid
  MOD_RES (16)..(17): Variable amino acid
  MOD_RES (20)..(22): Variable amino acid
  MOD_RES (23)..(23): Variable amino acid that may or may not be present
  MOD_RES (24)..(24): Variable amino acid
  MOD_RES (26)..(26): Variable amino acid
  MOD_RES (28)..(30): Variable amino acid
  MOD_RES (33)..(33): Variable amino acid
CXPCFTTXXXXXXXCXXCCXXXXXGXCXXXQCXC

SEQ ID NO: 31 - protein, 34 aa, Artificial Sequence
  Description of Artificial Sequence: Synthetic amino acid sequence
  MOD_RES (2)..(2): Variable amino acid
  MOD_RES (5)..(14): Variable amino acid
  MOD_RES (16)..(17): Variable amino acid
  MOD_RES (20)..(22): Variable amino acid
  MOD_RES (23)..(23): Variable amino acid that may or may not be present
  MOD_RES (24)..(24): Variable amino acid
  MOD_RES (28)..(31): Variable amino acid
  MOD_RES (33)..(33): Variable amino acid
CXPCXXXXXXXXXXCXXCCXXXXXXXCXXXXCXC

SEQ ID NO: 32 - protein, 34 aa, Artificial Sequence
  Description of Artificial Sequence: Synthetic amino acid sequence
  MOD_RES (2)..(3): Variable amino acid
  MOD_RES (5)..(14): Variable amino acid
  MOD_RES (16)..(17): Variable amino acid
  MOD_RES (20)..(22): Variable amino acid
  MOD_RES (23)..(23): Variable amino acid that may or may not be present
  MOD_RES (24)..(26): Variable amino acid
  MOD_RES (28)..(31): Variable amino acid
  MOD_RES (33)..(33): Variable amino acid
CXXCXXXXXXXXXXCXXCCXXXXXXXCXXXXCXC

SEQ ID NO: 33 - protein, 25 aa, Artificial Sequence
  Description of Artificial Sequence: Synthetic amino acid sequence
  MOD_RES (2)..(7): Variable amino acid
  MOD_RES (9)..(14): Variable amino acid
  MOD_RES (17)..(19): Variable amino acid
  MOD_RES (21)..(24): Variable amino acid
CXXXXXXCXXXXXXCCXXXCXXXXC

SEQ ID NO: 34 - protein, 37 aa, Artificial Sequence
  Description of Artificial Sequence: Synthetic amino acid sequence
  MOD_RES (2)..(3): Variable amino acid
  MOD_RES (4)..(4): Variable amino acid that may or may not be present
  MOD_RES (5)..(5): Variable amino acid
  MOD_RES (7)..(16): Variable amino acid
  MOD_RES (18)..(18): Variable amino acid
  MOD_RES (20)..(22): Variable amino acid
  MOD_RES (24)..(28): Variable amino acid
  MOD_RES (31)..(36): Variable amino acid
CXXXXCXXXXXXXXXXCXCXXXCXXXXXCCXXXXXXC

SEQ ID NO: 35 - protein, 37 aa, Artificial Sequence
  Description of Artificial Sequence: Synthetic amino acid sequence
  MOD_RES (2)..(3): Variable amino acid
  MOD_RES (4)..(4): Variable amino acid that may or may not be present
  MOD_RES (7)..(7): Variable amino acid
  MOD_RES (9)..(16): Variable amino acid
  MOD_RES (18)..(18): Variable amino acid
  MOD_RES (20)..(22): Variable amino acid
  MOD_RES (24)..(28): Variable amino acid
  MOD_RES (31)..(31): Variable amino acid
  MOD_RES (33)..(33): Tyr or Phe
  MOD_RES (34)..(36): Variable amino acid
CXXXRCXEXXXXXXXXCXCXXXCXXXXXCCXDXXXXC

SEQ ID NO: 36 - protein, 66 aa, Artificial Sequence
  Description of Artificial Sequence: Synthetic amino acid sequence
  MOD_RES (2)..(6): Variable amino acid
  MOD_RES (7)..(7): Variable amino acid that may or may not be present
  MOD_RES (8)..(8): Variable amino acid
  MOD_RES (9)..(9): Variable amino acid that may or may not be present
  MOD_RES (10)..(14): Variable amino acid
  MOD_RES (17)..(17): Variable amino acid
  MOD_RES (19)..(21): Variable amino acid
  MOD_RES (23)..(23): Tyr or Phe
  MOD_RES (24)..(24): Variable amino acid
  MOD_RES (26)..(29): Variable amino acid
  MOD_RES (30)..(31): Variable amino acid that may or may not be present
  MOD_RES (33)..(34): Variable amino acid
  MOD_RES (36)..(40): Variable amino acid
  MOD_RES (44)..(45): Variable amino acid
  MOD_RES (49)..(52): Variable amino acid
  MOD_RES (53)..(53): Variable amino acid that may or may not be present
  MOD_RES (54)..(58): Variable amino acid
  MOD_RES (61)..(61): Variable amino acid
  MOD_RES (64)..(64): Variable amino acid
CXXXXXXXXXXXXXCPXGXXXCXXKXXXXXXCXXRXXXXXRGCXXTCPXXXXXXXXXXCCXTDXCN

SEQ ID NO: 37 - protein, 66 aa, Artificial Sequence
  Description of Artificial Sequence: Synthetic amino acid sequence
  MOD_RES (2)..(6): Variable amino acid
  MOD_RES (7)..(7): Variable amino acid that may or may not be present
  MOD_RES (8)..(8): Variable amino acid
  MOD_RES (9)..(9): Variable amino acid that may or may not be present
  MOD_RES (10)..(14): Variable amino acid
  MOD_RES (16)..(21): Variable amino acid
  MOD_RES (23)..(29): Variable amino acid
  MOD_RES (30)..(31): Variable amino acid that may or may not be present
  MOD_RES (33)..(41): Variable amino acid
  MOD_RES (44)..(46): Variable amino acid
  MOD_RES (49)..(52): Variable amino acid
  MOD_RES (53)..(53): Variable amino acid that may or may not be present
  MOD_RES (54)..(58): Variable amino acid
  MOD_RES (61)..(64): Variable amino acid
CXXXXXXXXXXXXXCXXXXXXCXXXXXXXXXCXXXXXXXXXGCXXXCPXXXXXXXXXXCCXXXXCN

SEQ ID NO: 38 - protein, 65 aa, Artificial Sequence
  Description of Artificial Sequence: Synthetic amino acid sequence
  MOD_RES (2)..(6): Variable amino acid
  MOD_RES (7)..(7): Variable amino acid that may or may not be present
  MOD_RES (8)..(8): Variable amino acid
  MOD_RES (9)..(9): Variable amino acid that may or may not be present
  MOD_RES (10)..(14): Variable amino acid
  MOD_RES (16)..(21): Variable amino acid
  MOD_RES (23)..(29): Variable amino acid
  MOD_RES (30)..(31): Variable amino acid that may or may not be present
  MOD_RES (33)..(42): Variable amino acid
  MOD_RES (44)..(46): Variable amino acid
  MOD_RES (48)..(52): Variable amino acid
  MOD_RES (53)..(53): Variable amino acid that may or may not be present
  MOD_RES (54)..(58): Variable amino acid
  MOD_RES (61)..(64): Variable amino acid
CXXXXXXXXXXXXXCXXXXXXCXXXXXXXXXCXXXXXXXXXXCXXXCXXXXXXXXXXXCCXXXXC

SEQ ID NO: 39 - protein, 85 aa, Artificial Sequence
  Description of Artificial Sequence: Synthetic amino acid sequence
  MOD_RES (2)..(3): Variable amino acid
  MOD_RES (5)..(12): Variable amino acid
  MOD_RES (14)..(16): Variable amino acid that may or may not be present
  MOD_RES (17)..(22): Variable amino acid
  MOD_RES (24)..(29): Variable amino acid
  MOD_RES (31)..(50): Variable amino acid
  MOD_RES (52)..(54): Variable amino acid
  MOD_RES (55)..(56): Variable amino acid that may or may not be present
  MOD_RES (57)..(57): Variable amino acid
  MOD_RES (59)..(59): May or may not be present
  MOD_RES (60)..(61): Variable amino acid
  MOD_RES (62)..(62): Variable amino acid that may or may not be present
  MOD_RES (63)..(72): Variable amino acid
  MOD_RES (73)..(73): Variable amino acid that may or may not be present
  MOD_RES (74)..(78): Variable amino acid
  MOD_RES (81)..(84): Variable amino acid
CXXCXXXXXXXXCXXXXXXXXXCXXXXXXCXXXXXXXXXXXXXXXXXXXXCXXXXXXCPXXXXXXXXXXXXXXXXXXXCCXXXXC

SEQ ID NO: 40 - protein, 39 aa, Artificial Sequence
  Description of Artificial Sequence: Synthetic amino acid sequence
  MOD_RES (3)..(3): Variable amino acid
  MOD_RES (5)..(9): Variable amino acid
  MOD_RES (11)..(14): Variable amino acid
  MOD_RES (18)..(19): Variable amino acid
  MOD_RES (21)..(21): Variable amino acid
  MOD_RES (24)..(27): Variable amino acid
  MOD_RES (30)..(31): Variable amino acid
  MOD_RES (32)..(32): Variable amino acid that may or may not be present
  MOD_RES (33)..(33): Variable amino acid
  MOD_RES (35)..(35): Variable amino acid
  MOD_RES (36)..(36): Variable amino acid that may or may not be present
  MOD_RES (37)..(38): Variable amino acid
CGXQXXXXXCXXXXCCSXXGXCGXXXXYCXXXXCXXXXC

SEQ ID NO: 41 - protein, 39 aa, Artificial Sequence
  Description of Artificial Sequence: Synthetic amino acid sequence
  MOD_RES (2)..(9): Variable amino acid
  MOD_RES (11)..(14): Variable amino acid
  MOD_RES (17)..(21): Variable amino acid
  MOD_RES (23)..(28): Variable amino acid
  MOD_RES (30)..(31): Variable amino acid
  MOD_RES (32)..(32): Variable amino acid that may or may not be present
  MOD_RES (33)..(33): Variable amino acid
  MOD_RES (35)..(35): Variable amino acid
  MOD_RES (36)..(36): Variable amino acid that may or may not be present
  MOD_RES (37)..(38): Variable amino acid
CXXXXXXXXCXXXXCCXXXXXCXXXXXXCXXXXCXXXXC

SEQ ID NO: 42 - protein, 59 aa, Artificial Sequence
  Description of Artificial Sequence: Synthetic amino acid sequence
  MOD_RES (2)..(4): Variable amino acid
  MOD_RES (5)..(5): Variable amino acid that may or may not be present
  MOD_RES (6)..(12): Variable amino acid
  MOD_RES (13)..(14): Variable amino acid that may or may not be present
  MOD_RES (15)..(17): Variable amino acid
  MOD_RES (19)..(19): Variable amino acid that may or may not be present
  MOD_RES (20)..(24): Variable amino acid
  MOD_RES (26)..(31): Variable amino acid
  MOD_RES (32)..(32): Variable amino acid that may or may not be present
  MOD_RES (33)..(35): Variable amino acid
  MOD_RES (37)..(48): Variable amino acid
  MOD_RES (50)..(54): Variable amino acid
  MOD_RES (55)..(56): Variable amino acid that may or may not be present
  MOD_RES (57)..(58): Variable amino acid
CXXXXXXXXXXXXXXXXCXXXXXXCXXXXXXXXXXCXXXXXXXXXXXXCXXXXXXXXXC

SEQ ID NO: 43 - protein, 59 aa, Artificial Sequence; identical to SEQ ID NO: 42
  Description of Artificial Sequence: Synthetic amino acid sequence
  MOD_RES (2)..(4): Variable amino acid
  MOD_RES (5)..(5): Variable amino acid that may or may not be present
  MOD_RES (6)..(12): Variable amino acid
  MOD_RES (13)..(14): Variable amino acid that may or may not be present
  MOD_RES (15)..(17): Variable amino acid
  MOD_RES (19)..(19): Variable amino acid that may or may not be present
  MOD_RES (20)..(21): Variable amino acid
  MOD_RES (22)..(22): Tyr or Phe
  MOD_RES (23)..(24): Variable amino acid
  MOD_RES (26)..(31): Variable amino acid
  MOD_RES (32)..(32): Variable amino acid that may or may not be present
  MOD_RES (33)..(35): Variable amino acid
  MOD_RES (37)..(41): Variable amino acid
  MOD_RES (42)..(42): Tyr or Phe
  MOD_RES (43)..(48): Variable amino acid
  MOD_RES (50)..(54): Variable amino acid
  MOD_RES (55)..(56): Variable amino acid that may or may not be present
  MOD_RES (57)..(58): Variable amino acid

SEQ ID NO: 44 - protein, 53 aa, Artificial Sequence
  Description of Artificial Sequence: Synthetic amino acid sequence
  MOD_RES (2)..(3): Variable amino acid that may or may not be present
  MOD_RES (4)..(4): Variable amino acid
  MOD_RES (6)..(7): May or may not be present
  MOD_RES (8)..(13): Variable amino acid
  MOD_RES (15)..(17): Variable amino acid
  MOD_RES (19)..(20): Variable amino acid
  MOD_RES (21)..(21): Variable amino acid that may or may not be present
  MOD_RES (22)..(24): Variable amino acid
  MOD_RES (26)..(28): Variable amino acid
  MOD_RES (30)..(31): Variable amino acid
  MOD_RES (32)..(32): Variable amino acid that may or may not be present
  MOD_RES (33)..(33): Variable amino acid
  MOD_RES (36)..(37): Variable amino acid
  MOD_RES (39)..(39): Variable amino acid
  MOD_RES (41)..(44): Variable amino acid
  MOD_RES (45)..(45): Variable amino acid that may or may not be present
  MOD_RES (46)..(50): Variable amino acid
  MOD_RES (52)..(52): Trp, Tyr, Leu or Phe
CXXXYGGXXXXXXCXXXCXXXXXXCXXXCXXXXGAXXGXCXXXXXXXXXXCXC

SEQ ID NO: 45 - protein, 53 aa, Artificial Sequence
  Description of Artificial Sequence: Synthetic amino acid sequence
  MOD_RES (2)..(3): Variable amino acid that may or may not be present
  MOD_RES (4)..(5): Variable amino acid
  MOD_RES (6)..(7): Variable amino acid that may or may not be present
  MOD_RES (8)..(13): Variable amino acid
  MOD_RES (15)..(17): Variable amino acid
  MOD_RES (19)..(20): Variable amino acid
  MOD_RES (21)..(21): Variable amino acid that may or may not be present
  MOD_RES (22)..(24): Variable amino acid
  MOD_RES (26)..(28): Variable amino acid
  MOD_RES (30)..(31): Variable amino acid
  MOD_RES (32)..(32): Variable amino acid that may or may not be present
  MOD_RES (33)..(39): Variable amino acid
  MOD_RES (41)..(44): Variable amino acid
  MOD_RES (45)..(45): Variable amino acid that may or may not be present
  MOD_RES (46)..(50): Variable amino acid
  MOD_RES (52)..(52): Variable amino acid
CXXXXXXXXXXXXCXXXCXXXXXXCXXXCXXXXXXXXXXCXXXXXXXXXXCXC

SEQ ID NO: 46 - protein, 68 aa, Artificial Sequence
  Description of Artificial Sequence: Synthetic amino acid sequence
  MOD_RES (2)..(9): Variable amino acid
  MOD_RES (11)..(13): Variable amino acid
  MOD_RES (15)..(17): Variable amino acid
  MOD_RES (19)..(23): Variable amino acid
  MOD_RES (24)..(27): Variable amino acid that may or may not be present
  MOD_RES (28)..(30): Variable amino acid
  MOD_RES (32)..(35): Variable amino acid
  MOD_RES (36)..(39): Variable amino acid that may or may not be present
  MOD_RES (40)..(41): Variable amino acid
  MOD_RES (43)..(46): Variable amino acid
  MOD_RES (48)..(48): Variable amino acid
  MOD_RES (50)..(59): Variable amino acid
  MOD_RES (60)..(60): Variable amino acid that may or may not be present
  MOD_RES (61)..(61): Variable amino acid
  MOD_RES (63)..(67): Variable amino acid
CXXXXXXXXCXXXCXXXCXXXXXXXXXXXXCXXXXXXXXXXCXXXXCXCXXXXXXXXXXXXCXXXXXC

SEQ ID NO: 47 - protein, 68 aa, Artificial Sequence
  Description of Artificial Sequence: Synthetic amino acid sequence
  MOD_RES (3)..(9): Variable amino acid
  MOD_RES (11)..(13): Variable amino acid
  MOD_RES (15)..(17): Variable amino acid
  MOD_RES (19)..(23): Variable amino acid
  MOD_RES (24)..(27): Variable amino acid that may or may not be present
  MOD_RES (28)..(30): Variable amino acid
  MOD_RES (32)..(35): Variable amino acid
  MOD_RES (36)..(39): Variable amino acid that may or may not be present
  MOD_RES (40)..(41): Variable amino acid
  MOD_RES (43)..(46): Variable amino acid
  MOD_RES (48)..(48): Variable amino acid
  MOD_RES (50)..(51): Variable amino acid
  MOD_RES (53)..(59): Variable amino acid
  MOD_RES (60)..(60): Variable amino acid that may or may not be present
  MOD_RES (61)..(61): Variable amino acid
  MOD_RES (64)..(67): Variable amino acid
CPXXXXXXXCXXXCXXXCXXXXXXXXXXXXCXXXXXXXXXXCXXXXCXCXXGXXXXXXXXXCVXXXXC

SEQ ID NO: 48 - protein, 48 aa, Artificial Sequence
  Description of Artificial Sequence: Synthetic amino acid sequence
  MOD_RES (2)..(4): Variable amino acid
  MOD_RES (6)..(13): Variable amino acid
  MOD_RES (16)..(20): Variable amino acid
  MOD_RES (21)..(21): Variable amino acid that may or may not be present
  MOD_RES (22)..(26): Variable amino acid
  MOD_RES (28)..(29): Variable amino acid
  MOD_RES (32)..(36): Variable amino acid
  MOD_RES (38)..(47): Variable amino acid
CXXXCXXXXXXXXCPXXXXXXXXXXXCXXCCXXXXXCXXXXXXXXXXC

SEQ ID NO: 49 - protein, 50 aa, Artificial Sequence
  Description of Artificial Sequence: Synthetic amino acid sequence
  MOD_RES (3)..(4): Variable amino acid
  MOD_RES (7)..(13): Variable amino acid
  MOD_RES (16)..(20): Variable amino acid
  MOD_RES (21)..(22): Variable amino acid that may or may not be present
  MOD_RES (23)..(27): Variable amino acid
  MOD_RES (29)..(30): Variable amino acid
  MOD_RES (33)..(34): Variable amino acid
  MOD_RES (36)..(36): Variable amino acid
  MOD_RES (39)..(39): Variable amino acid
  MOD_RES (40)..(41): Tyr, Phe or Leu
  MOD_RES (42)..(45): Variable amino acid
  MOD_RES (47)..(48): Variable amino acid
  MOD_RES (49)..(49): Ile, Val or Leu
CTXXCDXXXXXXXCPXXXXXXXXXXXXCXXCCXXGXGCXXXXXXXGXXXC

SEQ ID NO: 50 - protein, 50 aa, Artificial Sequence
  Description of Artificial Sequence: Synthetic amino acid sequence
  MOD_RES (2)..(5): Variable amino acid
  MOD_RES (7)..(8): Variable amino acid
  MOD_RES (9)..(9): Phe, Trp or Tyr
  MOD_RES (10)..(10): Variable amino acid
  MOD_RES (12)..(12): Variable amino acid
  MOD_RES (14)..(18): Variable amino acid
  MOD_RES (20)..(22): Variable amino acid
  MOD_RES (24)..(25): Variable amino acid
  MOD_RES (27)..(29): Variable amino acid
  MOD_RES (30)..(31): Variable amino acid that may or may not be present
  MOD_RES (32)..(32): Variable amino acid
  MOD_RES (34)..(34): Variable amino acid
  MOD_RES (36)..(37): Variable amino acid
  MOD_RES (38)..(39): Variable amino acid that may or may not be present
  MOD_RES (40)..(41): Variable amino acid
  MOD_RES (43)..(43): Arg or Lys
  MOD_RES (45)..(45): Variable amino acid
  MOD_RES (47)..(49): Variable amino acid
CXXXXSXXXXGXCXXXXXCXXXCXXEXXXXXXGXCXXXXXXRXCXCXXXC

SEQ ID NO: 51 - protein, 50 aa, Artificial Sequence
  Description of Artificial Sequence: Synthetic amino acid sequence
  MOD_RES (2)..(5): Variable amino acid
  MOD_RES (7)..(8): Variable amino acid
  MOD_RES (10)..(10): Variable amino acid
  MOD_RES (12)..(12): Variable amino acid
  MOD_RES (14)..(18): Variable amino acid
  MOD_RES (20)..(22): Variable amino acid
  MOD_RES (24)..(29): Variable amino acid
  MOD_RES (30)..(31): Variable amino acid that may or may not be present
  MOD_RES (32)..(32): Variable amino acid
  MOD_RES (34)..(34): Variable amino acid
  MOD_RES (36)..(37): Variable amino acid
  MOD_RES (38)..(39): Variable amino acid that may or may not be present
  MOD_RES (40)..(43): Variable amino acid
  MOD_RES (45)..(45): Variable amino acid
  MOD_RES (47)..(49): Variable amino acid
CXXXXSXXFXGXCXXXXXCXXXCXXXXXXXXXGXCXXXXXXXXCXCXXXC

SEQ ID NO: 52 - protein, 50 aa, Artificial Sequence
  Description of Artificial Sequence: Synthetic amino acid sequence
  MOD_RES (2)..(12): Variable amino acid
  MOD_RES (14)..(18): Variable amino acid
  MOD_RES (20)..(22): Variable amino acid
  MOD_RES (24)..(29): Variable amino acid
  MOD_RES (30)..(31): Variable amino acid that may or may not be present
  MOD_RES (32)..(34): Variable amino acid
  MOD_RES (36)..(37): Variable amino acid
  MOD_RES (38)..(39): Variable amino acid that may or may not be present
  MOD_RES (40)..(43): Variable amino acid
  MOD_RES (45)..(45): Variable amino acid
  MOD_RES (47)..(49): Variable amino acid
CXXXXXXXXXXXCXXXXXCXXXCXXXXXXXXXXXCXXXXXXXXCXCXXXC

SEQ ID NO: 53 - protein, 26 aa, Artificial Sequence
  Description of Artificial Sequence: Synthetic amino acid sequence
  MOD_RES (2)..(4): Variable amino acid that may or may not be present
  MOD_RES (5)..(10): Variable amino acid
  MOD_RES (13)..(15): Variable amino acid
  MOD_RES (16)..(16): Variable amino acid that may or may not be present
  MOD_RES (17)..(17): Variable amino acid
  MOD_RES (19)..(20): Variable amino acid
  MOD_RES (21)..(22): Variable amino acid that may or may not be present
  MOD_RES (23)..(25): Variable amino acid
CXXXXXXXXXCCXXXXXCXXXXXXXC

SEQ ID NO: 54 - protein, 24 aa, Artificial Sequence
  Description of Artificial Sequence: Synthetic amino acid sequence
  MOD_RES (2)..(4): Variable amino acid
  MOD_RES (6)..(6): Variable amino acid
  MOD_RES (9)..(10): Variable amino acid
  MOD_RES (12)..(14): Variable amino acid
  MOD_RES (16)..(16): Variable amino acid
  MOD_RES (18)..(21): Variable amino acid
  MOD_RES (22)..(22): Cys or variable amino acid
  MOD_RES (23)..(23): Variable amino acid
  MOD_RES (24)..(24): Cys or variable amino acid
CXXXCXSHXXCXXXCXCXXXXXXX

SEQ ID NO: 55 - protein, 26 aa, Artificial Sequence
  Description of Artificial Sequence: Synthetic amino acid sequence
  MOD_RES (2)..(2): Variable amino acid
  MOD_RES (5)..(6): Variable amino acid
  MOD_RES (11)..(11): Variable amino acid
  MOD_RES (14)..(14): Variable amino acid
  MOD_RES (16)..(17): Variable amino acid
  MOD_RES (19)..(19): Variable amino acid
  MOD_RES (22)..(25): Variable amino acid
CXGRXXRCPPXCCXGXXCXRGXXXXC

SEQ ID NO: 56 - protein, 26 aa, Artificial Sequence
  Description of Artificial Sequence: Synthetic amino acid sequence
  MOD_RES (2)..(7): Variable amino acid
  MOD_RES (9)..(11): Variable amino acid
  MOD_RES (14)..(17): Variable amino acid
  MOD_RES (19)..(25): Variable amino acid
CXXXXXXCXXXCCXXXXCXXXXXXXC

SEQ ID NO: 57 - protein, 19 aa, Artificial Sequence
  Description of Artificial Sequence: Synthetic amino acid sequence
  MOD_RES (3)..(4): Variable amino acid
  MOD_RES (6)..(7): Variable amino acid
  MOD_RES (9)..(10): Variable amino acid
  MOD_RES (12)..(12): Variable amino acid
  MOD_RES (14)..(14): Variable amino acid
  MOD_RES (16)..(17): Variable amino acid
CCXXPXXCXXRXCXPXXCC

SEQ ID NO: 58 - protein, 19 aa, Artificial Sequence
  Description of Artificial Sequence: Synthetic amino acid sequence
  MOD_RES (3)..(7): Variable amino acid
  MOD_RES (9)..(12): Variable amino acid
  MOD_RES (14)..(17): Variable amino acid
CCXXXXXCXXXXCXXXXCC

SEQ ID NO: 59 - protein, 23 aa, Artificial Sequence
  Description of Artificial Sequence: Synthetic amino acid sequence
  MOD_RES (4)..(4): Variable amino acid
  MOD_RES (7)..(9): Variable amino acid
  MOD_RES (14)..(14): Variable amino acid
  MOD_RES (16)..(18): Variable amino acid
  MOD_RES (21)..(21): Variable amino acid
CCGXYPXXXCHPCXCXXXRPXYC

SEQ ID NO: 60 - protein, 23 aa, Artificial Sequence
  Description of Artificial Sequence: Synthetic amino acid sequence
  MOD_RES (3)..(9): Variable amino acid
  MOD_RES (11)..(12): Variable amino acid
  MOD_RES (14)..(14): Variable amino acid
  MOD_RES (16)..(22): Variable amino acid
CCXXXXXXXCXXCXCXXXXXXXC

SEQ ID NO: 61 - protein, 28 aa, Artificial Sequence
  Description of Artificial Sequence: Synthetic amino acid sequence
  MOD_RES (2)..(3): Variable amino acid
  MOD_RES (6)..(7): Variable amino acid
  MOD_RES (9)..(13): Variable amino acid
  MOD_RES (14)..(14): Cys or variable amino acid
  MOD_RES (17)..(17): Variable amino acid
  MOD_RES (18)..(18): Variable amino acid that may or may not be present
  MOD_RES (21)..(21): Cys or variable amino acid
  MOD_RES (23)..(24): Variable amino acid
  MOD_RES (26)..(27): Variable amino acid
CXXTGXXCXXXXXXCSXXGAXSXXFXXC

SEQ ID NO: 62 - protein, 28 aa, Artificial Sequence
  Description of Artificial Sequence: Synthetic amino acid sequence
  MOD_RES (2)..(7): Variable amino acid
  MOD_RES (9)..(13): Variable amino acid
  MOD_RES (14)..(14): Cys or variable amino acid
  MOD_RES (16)..(17): Variable amino acid
  MOD_RES (18)..(18): Variable amino acid that may or may not be present
  MOD_RES (19)..(20): Variable amino acid
  MOD_RES (21)..(21): Cys or variable amino acid
  MOD_RES (22)..(27): Variable amino acid
CXXXXXXCXXXXXXCXXXXXXXXXXXXC

SEQ ID NO: 63 - protein, 30 aa, Artificial Sequence
  Description of Artificial Sequence: Synthetic amino acid sequence
  MOD_RES (2)..(5): Variable amino acid
  MOD_RES (7)..(7): Variable amino acid that may or may not be present
  MOD_RES (8)..(10): Variable amino acid
  MOD_RES (12)..(13): Variable amino acid
  MOD_RES (15)..(17): Variable amino acid
  MOD_RES (19)..(20): Variable amino acid
  MOD_RES (23)..(24): Variable amino acid
  MOD_RES (25)..(26): Variable amino acid that may or may not be present
  MOD_RES (27)..(27): Variable amino acid
  MOD_RES (29)..(29): Variable amino acid
CXXXXCXXXXCXXGXXXDXXGCXXXXXCXC

SEQ ID NO: 64 - protein, 30 aa, Artificial Sequence
  Description of Artificial Sequence: Synthetic amino acid sequence
  MOD_RES (2)..(5): Variable amino acid
  MOD_RES (7)..(7): Variable amino acid that may or may not be present
  MOD_RES (8)..(10): Variable amino acid
  MOD_RES (12)..(21): Variable amino acid
  MOD_RES (23)..(24): Variable amino acid
  MOD_RES (25)..(26): Variable amino acid that may or may not be present
  MOD_RES (27)..(27): Variable amino acid
  MOD_RES (29)..(29): Variable amino acid
CXXXXCXXXXCXXXXXXXXXXCXXXXXCXC

SEQ ID NO: 65 - protein, 27 aa, Artificial Sequence
  Description of Artificial Sequence: Synthetic amino acid sequence
  MOD_RES (2)..(7): Variable amino acid
  MOD_RES (14)..(14): Variable amino acid
  MOD_RES (16)..(16): Variable amino acid
  MOD_RES (21)..(23): Variable amino acid
  MOD_RES (25)..(25): Variable amino acid
CXXXXXXCCDPCAXCXCRFFXXXCXCR

SEQ ID NO: 66 - protein, 26 aa, Artificial Sequence
  Description of Artificial Sequence: Synthetic amino acid sequence
  MOD_RES (2)..(7): Variable amino acid
  MOD_RES (10)..(11): Variable amino acid
  MOD_RES (13)..(14): Variable amino acid
  MOD_RES (16)..(16): Variable amino acid
  MOD_RES (18)..(23): Variable amino acid
  MOD_RES (25)..(25): Variable amino acid
CXXXXXXCCXXCXXCXCXXXXXXCXC

SEQ ID NO: 67 - protein, 29 aa, Artificial Sequence
  Description of Artificial Sequence: Synthetic amino acid sequence
  MOD_RES (2)..(2): Variable amino acid
  MOD_RES (5)..(7): Variable amino acid
  MOD_RES (9)..(10): Variable amino acid
  MOD_RES (13)..(13): Variable amino acid
  MOD_RES (15)..(15): Variable amino acid
  MOD_RES (17)..(20): Variable amino acid
  MOD_RES (21)..(21): Variable amino acid that may or may not be present
  MOD_RES (22)..(24): Variable amino acid
  MOD_RES (26)..(28): Variable amino acid
CXPGXXXKXXCNXCXCXXXXXXXXTXXXC

SEQ ID NO: 68 - protein, 29 aa, Artificial Sequence
  Description of Artificial Sequence: Synthetic amino acid sequence
  MOD_RES (2)..(10): Variable amino acid
  MOD_RES (13)..(13): Variable amino acid
  MOD_RES (15)..(15): Variable amino acid
  MOD_RES (17)..(20): Variable amino acid
  MOD_RES (21)..(21): Variable amino acid that may or may not be present
  MOD_RES (22)..(24): Variable amino acid
  MOD_RES (26)..(28): Variable amino acid
CXXXXXXXXXCNXCXCXXXXXXXXTXXXC

SEQ ID NO: 69 - protein, 29 aa, Artificial Sequence
  Description of Artificial Sequence: Synthetic amino acid sequence
  MOD_RES (2)..(10): Variable amino acid
  MOD_RES (12)..(13): Variable amino acid
  MOD_RES (15)..(15): Variable amino acid
  MOD_RES (17)..(20): Variable amino acid
  MOD_RES (21)..(21): Variable amino acid that may or may not be present
  MOD_RES (22)..(28): Variable amino acid
CXXXXXXXXXCXXCXCXXXXXXXXXXXXC

SEQ ID NO: 70 - protein, 40 aa, Artificial Sequence
  Description of Artificial Sequence: Synthetic amino acid sequence
  MOD_RES (2)..(3): Variable amino acid
  MOD_RES (4)..(5): Variable amino acid that may or may not be present
  MOD_RES (6)..(10): Variable amino acid
  MOD_RES (12)..(18): Variable amino acid
  MOD_RES (19)..(19): Variable amino acid that may or may not be present
  MOD_RES (21)..(32): Variable amino acid
  MOD_RES (34)..(36): Variable amino acid
  MOD_RES (38)..(39): Variable amino acid
CXXXXXXXXXCXXXXXXXXCXXXXXXXXXXXXCXXXCXXC

SEQ ID NO: 71 - protein, 40 aa, Artificial Sequence
  Description of Artificial Sequence: Synthetic amino acid sequence
  MOD_RES (2)..(3): Variable amino acid
  MOD_RES (4)..(5): Variable amino acid that may or may not be present
  MOD_RES (7)..(10): Variable amino acid
  MOD_RES (12)..(18): Variable amino acid
  MOD_RES (19)..(19): Variable amino acid that may or may not be present
  MOD_RES (21)..(32): Variable amino acid
  MOD_RES (34)..(36): Variable amino acid
  MOD_RES (38)..(39): Variable amino acid
CXXXXDXXXXCXXXXXXXXCXXXXXXXXXXXXCXXXCXXC

SEQ ID NO: 72 - protein, 40 aa, Artificial Sequence
  Description of Artificial Sequence: Synthetic amino acid sequence
  MOD_RES (2)..(3): Variable amino acid
  MOD_RES (4)..(5): Variable amino acid that may or may not be present
  MOD_RES (7)..(10): Variable amino acid
  MOD_RES (12)..(13): Variable amino acid
  MOD_RES (14)..(14): Trp, Tyr, Leu, Phe, Ile or Met
  MOD_RES (15)..(18): Variable amino acid
  MOD_RES (19)..(19): Variable amino acid that may or may not be present
  MOD_RES (21)..(32): Variable amino acid
  MOD_RES (34)..(35): Variable amino acid
  MOD_RES (38)..(39): Variable amino acid
CXXXXDXXXXCXXXXXXXXCXXXXXXXXXXXXCXXTCXXC

SEQ ID NO: 73 - protein, 40 aa, Artificial Sequence
  Description of Artificial Sequence: Synthetic amino acid sequence
  MOD_RES (2)..(5): Variable amino acid that may or may not be present
  MOD_RES (7)..(11): Variable amino acid
  MOD_RES (13)..(15): Variable amino acid
  MOD_RES (16)..(22): Variable amino acid that may or may not be present
  MOD_RES (23)..(25): Variable amino acid
  MOD_RES (27)..(27): Variable amino acid
  MOD_RES (29)..(32): Variable amino acid
  MOD_RES (33)..(34): Variable amino acid that may or may not be present
  MOD_RES (35)..(39): Variable amino acid
CXXXXCXXXXXCXXXXXXXXXXXXXCXCXXXXXXXXXXXC

SEQ ID NO: 74 - protein, 40 aa, Artificial Sequence
  Description of Artificial Sequence: Synthetic amino acid sequence
  MOD_RES (2)..(5): Variable amino acid that may or may not be present
  MOD_RES (7)..(9): Variable amino acid
  MOD_RES (11)..(11): Variable amino acid
  MOD_RES (13)..(15): Variable amino acid
  MOD_RES (16)..(22): Variable amino acid that may or may not be present
  MOD_RES (23)..(25): Variable amino acid
  MOD_RES (27)..(27): Variable amino acid
  MOD_RES (29)..(32): Variable amino acid
  MOD_RES (33)..(34): Variable amino acid that may or may not be present
  MOD_RES (35)..(36): Variable amino acid
  MOD_RES (38)..(39): Variable amino acid
CXXXXCXXXGXCXXXXXXXXXXXXXCXCXXXXXXXXGXXC

SEQ ID NO: 75 - protein, 40 aa, Artificial Sequence; identical to SEQ ID NO: 74
  Description of Artificial Sequence: Synthetic amino acid sequence
  MOD_RES (2)..(5): Variable amino acid that may or may not be present
  MOD_RES (7)..(9): Variable amino acid
  MOD_RES (11)..(11): Variable amino acid
  MOD_RES (13)..(15): Variable amino acid
  MOD_RES (16)..(22): Variable amino acid that may or may not be present
  MOD_RES (23)..(25): Variable amino acid
  MOD_RES (27)..(27): Variable amino acid
  MOD_RES (29)..(32): Variable amino acid
  MOD_RES (33)..(34): Variable amino acid that may or may not be present
  MOD_RES (35)..(35): Tyr, Trp, Phe, Leu or His
  MOD_RES (36)..(36): Variable amino acid
  MOD_RES (38)..(39): Variable amino acid

SEQ ID NO: 76 - protein, 40 aa, Artificial Sequence
  Description of Artificial Sequence: Synthetic amino acid sequence
  MOD_RES (2)..(5): Variable amino acid
  MOD_RES (6)..(6): Variable amino acid that may or may not be present
  MOD_RES (7)..(7): Variable amino acid
  MOD_RES (9)..(13): Variable amino acid
  MOD_RES (15)..(19): Variable amino acid
  MOD_RES (20)..(21): Variable amino acid that may or may not be present
  MOD_RES (22)..(24): Variable amino acid
  MOD_RES (26)..(26): Variable amino acid
  MOD_RES (28)..(30): Variable amino acid
  MOD_RES (31)..(33): Variable amino acid that may or may not be present
  MOD_RES (34)..(39): Variable amino acid
CXXXXXXCXXXXXCXXXXXXXXXXCXCXXXXXXXXXXXXC

SEQ ID NO: 77 - protein, 40 aa, Artificial Sequence
  Description of Artificial Sequence: Synthetic amino acid sequence
  MOD_RES (2)..(5): Variable amino acid
  MOD_RES (6)..(6): Variable amino acid that may or may not be present
  MOD_RES (7)..(7): Variable amino acid
  MOD_RES (9)..(11): Variable amino acid
  MOD_RES (13)..(13): Variable amino acid
  MOD_RES (15)..(19): Variable amino acid
  MOD_RES (20)..(21): Variable amino acid that may or may not be present
  MOD_RES (22)..(24): Variable amino acid
  MOD_RES (26)..(26): Variable amino acid
  MOD_RES (28)..(29): Variable amino acid
  MOD_RES (31)..(33): Variable amino acid that may or may not be present
  MOD_RES (34)..(36): Variable amino acid
  MOD_RES (38)..(39): Variable amino acid
CXXXXXXCXXXGXCXXXXXXXXXXCXCXXGXXXXXXGXXC

SEQ ID NO: 78 - protein, 64 aa, Artificial Sequence
  Description of Artificial Sequence: Synthetic amino acid sequence
  MOD_RES (2)..(2): Variable amino acid
  MOD_RES (4)..(10): Variable amino acid
  MOD_RES (11)..(12): Variable amino acid that may or may not be present
  MOD_RES (13)..(14): Variable amino acid
  MOD_RES (16)..(18): Variable amino acid
  MOD_RES (19)..(26): Variable amino acid that may or may not be present
  MOD_RES (27)..(32): Variable amino acid
  MOD_RES (34)..(34): Variable amino acid
  MOD_RES (36)..(43): Variable amino acid
  MOD_RES (45)..(46): Variable amino acid
  MOD_RES (48)..(56): Variable amino acid
  MOD_RES (57)..(58): Variable amino acid that may or may not be present
  MOD_RES (59)..(63): Variable amino acid
CXCXXXXXXXXXXXCXXXXXXXXXXXXXXXXXCXCXXXXXXXXCXXCXXXXXXXXXXXXXXXXC

SEQ ID NO: 79 - protein, 64 aa, Artificial Sequence
  Description of Artificial Sequence: Synthetic amino acid sequence
  MOD_RES (2)..(2): Variable amino acid
  MOD_RES (4)..(10): Variable amino acid
  MOD_RES (11)..(12): Variable amino acid that may or may not be present
  MOD_RES (13)..(14): Variable amino acid
  MOD_RES (16)..(18): Variable amino acid
  MOD_RES (19)..(26): Variable amino acid that may or may not be present
  MOD_RES (27)..(30): Variable amino acid
  MOD_RES (32)..(32): Variable amino acid
  MOD_RES (34)..(34): Variable amino acid
  MOD_RES (36)..(40): Variable amino acid
  MOD_RES (42)..(43): Variable amino acid
  MOD_RES (45)..(46): Variable amino acid
  MOD_RES (48)..(56): Variable amino acid
  MOD_RES (57)..(58): Variable amino acid that may or may not be present
  MOD_RES (59)..(63): Variable amino acid
CXCXXXXXXXXXXXCXXXXXXXXXXXXXXXGXCXCXXXXXGXXCXXCXXXXXXXXXXXXXXXXC

SEQ ID NO: 80 - protein, 53 aa, Artificial Sequence
  Description of Artificial Sequence: Synthetic amino acid sequence
  MOD_RES (2)..(2): Variable amino acid
  MOD_RES (6)..(11): Variable amino acid
  MOD_RES (13)..(13): Variable amino acid
  MOD_RES (14)..(15): Variable amino acid that may or may not be present
  MOD_RES (16)..(20): Variable amino acid
  MOD_RES (22)..(22): Variable amino acid
  MOD_RES (24)..(25): Variable amino acid
  MOD_RES (27)..(27): Variable amino acid
  MOD_RES (28)..(28): Phe or Tyr
  MOD_RES (29)..(29): Variable amino acid
  MOD_RES (31)..(31): Variable amino acid
  MOD_RES (32)..(34): Variable amino acid that may or may not be present
  MOD_RES (35)..(35): Variable amino acid
  MOD_RES (37)..(38): Variable amino acid
  MOD_RES (40)..(40): Tyr or Phe
  MOD_RES (41)..(41): Variable amino acid
  MOD_RES (42)..(45): Variable amino acid that may or may not be present
  MOD_RES (46)..(52): Variable amino acid
DXDECXXXXXXCXXXXXXXXCXNXXGXXXCXXXXXCXXGXXXXXXXXXXXXXC

SEQ ID NO: 81 - protein, 53 aa, Artificial Sequence
  Description of Artificial Sequence: Synthetic amino acid sequence
  MOD_RES (2)..(3): Variable amino acid
  MOD_RES (6)..(11): Variable amino acid
  MOD_RES (13)..(13): Variable amino acid
  MOD_RES (14)..(15): Variable amino acid that may or may not be present
  MOD_RES (16)..(20): Variable amino acid
  MOD_RES (22)..(22): Variable amino acid
  MOD_RES (24)..(25): Variable amino acid
  MOD_RES (27)..(29): Variable amino acid
  MOD_RES (31)..(31): Variable amino acid
  MOD_RES (32)..(34): Variable amino acid that may or may not be present
  MOD_RES (35)..(35): Variable amino acid
  MOD_RES (37)..(41): Variable amino acid
  MOD_RES (42)..(45): Variable amino acid that may or may not be present
  MOD_RES (46)..(52): Variable amino acid
DXXECXXXXXXCXXXXXXXXCXNXXGXXXCXXXXXCXXXXXXXXXXXXXXXXC

SEQ ID NO: 82 - protein, 49 aa, Artificial Sequence
  Description of Artificial Sequence: Synthetic amino acid sequence
  MOD_RES (2)..(7): Variable amino acid
  MOD_RES (9)..(9): Variable amino acid
  MOD_RES (10)..(11): Variable amino acid that may or may not be present
  MOD_RES (12)..(16): Variable amino acid
  MOD_RES (18)..(25): Variable amino acid
  MOD_RES (27)..(27): Variable amino acid
  MOD_RES (28)..(30): Variable amino acid that may or may not be present
  MOD_RES (31)..(31): Variable amino acid
  MOD_RES (33)..(37): Variable amino acid
  MOD_RES (38)..(41): Variable amino acid that may or may not be present
  MOD_RES (42)..(48): Variable amino acid
CXXXXXXCXXXXXXXXCXXXXXXXXCXXXXXCXXXXXXXXXXXXXXXXC

SEQ ID NO: 83 - protein, 40 aa, Artificial Sequence
  Description of Artificial Sequence: Synthetic amino acid sequence
  MOD_RES (3)..(3): Variable amino acid
  MOD_RES (6)..(9): Variable amino acid
  MOD_RES (12)..(13): Variable amino acid
  MOD_RES (14)..(14): Variable amino acid that may or may not be present
  MOD_RES (15)..(16): Variable amino acid
  MOD_RES (18)..(19): Variable amino acid
  MOD_RES (21)..(21): Variable amino acid
  MOD_RES (25)..(26): Variable amino acid
  MOD_RES (29)..(29): Variable amino acid
  MOD_RES (31)..(32): Variable amino acid
  MOD_RES (35)..(39): Variable amino acid
CSXHGXXXXDGXXXXXGXXPXCECXXCYXGXXCSXXXXXC

SEQ ID NO: 84 - protein, 40 aa, Artificial Sequence
  Description of Artificial Sequence: Synthetic amino acid sequence
  MOD_RES (2)..(3): Variable amino acid
  MOD_RES (6)..(9): Variable amino acid
  MOD_RES (12)..(13): Variable amino acid
  MOD_RES (14)..(14): Variable amino acid that may or may not be present
  MOD_RES (15)..(16): Variable amino acid
  MOD_RES (18)..(19): Variable amino acid
  MOD_RES (21)..(21): Variable amino acid
  MOD_RES (23)..(23): Variable amino acid
  MOD_RES (25)..(26): Variable amino acid
  MOD_RES (28)..(29): Variable amino acid
  MOD_RES (31)..(32): Variable amino acid
  MOD_RES (34)..(39): Variable amino acid
CXXHGXXXXDGXXXXXGXXPXCXCXXCXXGXXCXXXXXXC

SEQ ID NO: 85 - protein, 40 aa, Artificial Sequence
  Description of Artificial Sequence: Synthetic amino acid sequence
  MOD_RES (2)..(13): Variable amino acid
  MOD_RES (14)..(14): Variable amino acid that may or may not be present
  MOD_RES (15)..(21): Variable amino acid
  MOD_RES (23)..(23): Variable amino acid
  MOD_RES (25)..(26): Variable amino acid
  MOD_RES (28)..(32): Variable amino acid
  MOD_RES (34)..(39): Variable amino acid
CXXXXXXXXXXXXXXXXXXXXCXCXXCXXXXXCXXXXXXC

SEQ ID NO: 86 - protein, 32 aa, Artificial Sequence
  Description of Artificial Sequence: Synthetic amino acid sequence
  MOD_RES (2)..(5): Variable amino acid
  MOD_RES (7)..(7): Variable amino acid
  MOD_RES (10)..(10): Variable amino acid
  MOD_RES (12)..(14): Variable amino acid
  MOD_RES (17)..(23): Variable amino acid
  MOD_RES (25)..(25): Variable amino acid
  MOD_RES (27)..(28): Variable amino acid
CXXXXGXCRXKXXXNCXXXXXXXCXNXXQKCC

SEQ ID NO: 87 - protein, 32 aa, Artificial Sequence
  Description of Artificial Sequence: Synthetic amino acid sequence
  MOD_RES (2)..(5): Variable amino acid
  MOD_RES (7)..(7): Variable amino acid
  MOD_RES (10)..(15): Variable amino acid
  MOD_RES (17)..(23): Variable amino acid
  MOD_RES (25)..(30): Variable amino acid
CXXXXGXCRXXXXXXCXXXXXXXCXXXXXXCC

SEQ ID NO: 88 - protein, 32 aa, Artificial Sequence
  Description of Artificial Sequence: Synthetic amino acid sequence
  MOD_RES (2)..(7): Variable amino acid
  MOD_RES (9)..(15): Variable amino acid
  MOD_RES (17)..(23): Variable amino acid
  MOD_RES (25)..(30): Variable amino acid
CXXXXXXCXXXXXXXCXXXXXXXCXXXXXXCC

SEQ ID NO: 89 - protein, 31 aa, Artificial Sequence
  Description of Artificial Sequence: Synthetic amino acid sequence
  MOD_RES (2)..(7): Variable amino acid
  MOD_RES (9)..(12): Variable amino acid
  MOD_RES (14)..(22): Variable amino acid
  MOD_RES (24)..(29): Variable amino acid
CXXXXXXCXXXXCXXXXXXXXXCXXXXXXCC

SEQ ID NO: 90 - protein, 31 aa, Artificial Sequence
  Description of Artificial Sequence: Synthetic amino acid sequence
  MOD_RES (2)..(5): Variable amino acid
  MOD_RES (7)..(7): Variable amino acid
  MOD_RES (9)..(12): Variable amino acid
  MOD_RES (14)..(20): Variable amino acid
  MOD_RES (22)..(22): Variable amino acid
  MOD_RES (24)..(29): Variable amino acid
CXXXXGXCXXXXCXXXXXXXGXCXXXXXXCC

SEQ ID NO: 91 - protein, 26 aa, Artificial Sequence
  Description of Artificial Sequence: Synthetic amino acid sequence
  MOD_RES (2)..(3): Variable amino acid
  MOD_RES (6)..(8): Variable amino acid
  MOD_RES (10)..(11): Variable amino acid
  MOD_RES (14)..(14): Variable amino acid
  MOD_RES (16)..(17): Variable amino acid
  MOD_RES (18)..(20): Variable amino acid that may or may not be present
  MOD_RES (21)..(23): Variable amino acid
  MOD_RES (25)..(25): Variable amino acid
CXXHCXXXGXXGGXCXXXXXXXXCXC

SEQ ID NO: 92 - protein, 26 aa, Artificial Sequence
  Description of Artificial Sequence: Synthetic amino acid sequence
  MOD_RES (2)..(3): Variable amino acid
  MOD_RES (6)..(14): Variable amino acid
  MOD_RES (16)..(17): Variable amino acid
  MOD_RES (18)..(20): Variable amino acid that may or may not be present
  MOD_RES (21)..(23): Variable amino acid
  MOD_RES (25)..(25): Variable amino acid
CXXHCXXXXXXXXXCXXXXXXXXCXC

SEQ ID NO: 93 - protein, 25 aa, Artificial Sequence
  Description of Artificial Sequence: Synthetic amino acid sequence
  MOD_RES (2)..(4): Variable amino acid
  MOD_RES (6)..(13): Variable amino acid
  MOD_RES (15)..(16): Variable amino acid
  MOD_RES (17)..(19): Variable amino acid that may or may not be present
  MOD_RES (20)..(22): Variable amino acid
  MOD_RES (24)..(24): Variable amino acid
CXXXCXXXXXXXXCXXXXXXXXCXC

SEQ ID NO: 94 - protein, 29 aa, Artificial Sequence
  Description of Artificial Sequence: Synthetic amino acid sequence
  MOD_RES (2)..(2): Variable amino acid
  MOD_RES (5)..(7): Variable amino acid
  MOD_RES (9)..(11): Variable amino acid
  MOD_RES (13)..(15): Variable amino acid
  MOD_RES (17)..(17): Variable amino acid
  MOD_RES (19)..(24): Variable amino acid
  MOD_RES (25)..(25): Tyr, Phe or His
  MOD_RES (26)..(26): Variable amino acid
  MOD_RES (27)..(27): Tyr, Phe or Leu
CXCRXXXCXXXEXXXGXCXXXXXXXXXCC

SEQ ID NO: 95 - protein, 29 aa, Artificial Sequence
  Description of Artificial Sequence: Synthetic amino acid sequence
  MOD_RES (2)..(2): Variable amino acid
  MOD_RES (5)..(7): Variable amino acid
  MOD_RES (9)..(11): Variable amino acid
  MOD_RES (13)..(15): Variable amino acid
  MOD_RES (17)..(17): Variable amino acid
  MOD_RES (19)..(27): Variable amino acid
CXCRXXXCXXXEXXXGXCXXXXXXXXXCC

SEQ ID NO: 96 - protein, 28 aa, Artificial Sequence
  Description of Artificial Sequence: Synthetic amino acid sequence
  MOD_RES (2)..(2): Variable amino acid
  MOD_RES (4)..(6): Variable amino acid
  MOD_RES (8)..(16): Variable amino acid
  MOD_RES (18)..(26): Variable amino acid
CXCXXXCXXXXXXXXXCXXXXXXXXXCC

SEQ ID NO: 97 - protein, 38 aa, Artificial Sequence
  Description of Artificial Sequence: Synthetic amino acid sequence
  MOD_RES (3)..(7): Variable amino acid
  MOD_RES (9)..(10): Variable amino acid
  MOD_RES (11)..(11): Tyr or Phe
  MOD_RES (13)..(13): Variable amino acid
  MOD_RES (16)..(17): Variable amino acid
  MOD_RES (19)..(23): Variable amino acid
  MOD_RES (26)..(29): Variable amino acid
  MOD_RES (31)..(31): Variable amino acid
  MOD_RES (36)..(37): Variable amino acid
CCXXXXXRXXXNXCRXXGXXXXXCAXXXXCXIISGXXC

SEQ ID NO: 98 - protein, 38 aa, Artificial Sequence
  Description of Artificial Sequence: Synthetic amino acid sequence
  MOD_RES (3)..(7): Variable amino acid
  MOD_RES (9)..(13): Variable amino acid
  MOD_RES (15)..(17): Variable amino acid
  MOD_RES (19)..(23): Variable amino acid
  MOD_RES (25)..(29): Variable amino acid
  MOD_RES (31)..(37): Variable amino acid
CCXXXXXRXXXXXCXXXGXXXXXCXXXXXCXXXXXXXC

SEQ ID NO: 99 - protein, 38 aa, Artificial Sequence
  Description of Artificial Sequence: Synthetic amino acid sequence
  MOD_RES (3)..(13): Variable amino acid
  MOD_RES (15)..(23): Variable amino acid
  MOD_RES (25)..(29): Variable amino acid
  MOD_RES (31)..(37): Variable amino acid
CCXXXXXXXXXXXCXXXXXXXXXCXXXXXCXXXXXXXC

SEQ ID NO: 100 - protein, 36 aa, Artificial Sequence
  Description of Artificial Sequence: Synthetic amino acid sequence
  MOD_RES (2)..(3): Variable amino acid
  MOD_RES (5)..(7): Variable amino acid
  MOD_RES (9)..(12): Variable amino acid
  MOD_RES (14)..(16): Variable amino acid
  MOD_RES (18)..(19): Variable amino acid
  MOD_RES (20)..(20): Variable amino acid that may or may not be present
  MOD_RES (21)..(25): Variable amino acid
  MOD_RES (27)..(29): Variable amino acid
  MOD_RES (30)..(30): Val or Ile
  MOD_RES (31)..(32): Variable amino acid
  MOD_RES (33)..(33): Variable amino acid that may or may not be present
  MOD_RES (34)..(35): Variable amino acid
CXXAXXXCXXXXCXXXCXXXXXXXXCXXXXXXXXXC

SEQ ID NO: 101 - protein, 37 aa, Artificial Sequence
  Description of Artificial Sequence: Synthetic amino acid sequence
  MOD_RES (2)..(7): Variable amino acid
  MOD_RES (9)..(12): Variable amino acid
  MOD_RES (14)..(16): Variable amino acid
  MOD_RES (18)..(19): Variable amino acid
  MOD_RES (20)..(20): Variable amino acid that may or may not be present
  MOD_RES (21)..(25): Variable amino acid
  MOD_RES (27)..(33): Variable amino acid
  MOD_RES (34)..(34): Variable amino acid that may or may not be present
  MOD_RES (35)..(36): Variable amino acid
CXXXXXXCXXXXCXXXCXXXXXXXXCXXXXXXXXXXC

SEQ ID NO: 102 - protein, 32 aa, Artificial Sequence
  Description of Artificial Sequence: Synthetic amino acid sequence
  MOD_RES (2)..(8): Variable amino acid
  MOD_RES (9)..(9): Variable amino acid that may or may not be present
  MOD_RES (10)..(14): Variable amino acid
  MOD_RES (18)..(21): Variable amino acid
  MOD_RES (22)..(22): Variable amino acid that may or may not be present
  MOD_RES (23)..(28): Variable amino acid
  MOD_RES (30)..(31): Variable amino acid
CXXXXXXXXXXXXXCCCXXXXXXXXXXXCXXC

SEQ ID NO: 103 - protein, 32 aa, Artificial Sequence
  Description of Artificial Sequence: Synthetic amino acid sequence
  MOD_RES (2)..(8): Variable amino acid
  MOD_RES (9)..(9): Variable amino acid that may or may not be present
  MOD_RES (10)..(11): Variable amino acid
  MOD_RES (13)..(14): Variable amino acid
  MOD_RES (18)..(21): Variable amino acid
  MOD_RES (22)..(22): Variable amino acid that may or may not be present
  MOD_RES (23)..(24): Variable amino acid
  MOD_RES (25)..(25): Trp, Phe, Ile or Val
  MOD_RES (27)..(28): Variable amino acid
  MOD_RES (31)..(31): Variable amino acid
CXXXXXXXXXXKXXCCCXXXXXXXXGXXCEXC

SEQ ID NO: 104 - protein, 84 aa, Artificial Sequence
  Description of Artificial Sequence: Synthetic amino acid sequence
  MOD_RES (2)..(7): Variable amino acid
  MOD_RES (8)..(8): Tyr, Phe or His
  MOD_RES (9)..(13): Variable amino acid
  MOD_RES (15)..(18): Variable amino acid
  MOD_RES (19)..(22): Variable amino acid that may or may not be present
  MOD_RES (23)..(25): Variable amino acid
  MOD_RES (27)..(27): Variable amino acid
  MOD_RES (28)..(28): Variable amino acid that may or may not be present
  MOD_RES (29)..(29): Variable amino acid
  MOD_RES (31)..(31): Variable amino acid
  MOD_RES (33)..(34): Variable amino acid
  MOD_RES (35)..(42): Variable amino acid that may or may not be present
  MOD_RES (43)..(46): Variable amino acid
  MOD_RES (48)..(51): Variable amino acid
  MOD_RES (53)..(54): Variable amino acid
  MOD_RES (55)..(59): Variable amino acid that may or may not be present
  MOD_RES (60)..(61): Variable amino acid
  MOD_RES (63)..(65): Variable amino acid
  MOD_RES (66)..(68): Variable amino acid that may or may not be present
  MOD_RES (69)..(75): Variable amino acid
  MOD_RES (80)..(80): Variable amino acid
  MOD_RES (81)..(82): Variable amino acid that may or may not be present
  MOD_RES (83)..(83): Variable amino acid
CXXXXXXXXXXXXWXXXXXXXXXXXCXXXCXCXXXXXXXXXXXXXXCXXXXCXXXXXXXXXCXXXXXXXXXXXXXGECCXXXXC

SEQ ID NO: 105 - protein, 83 aa, Artificial Sequence
  Description of Artificial Sequence: Synthetic amino acid sequence
  MOD_RES (2)..(13): Variable amino acid
  MOD_RES (15)..(18): Variable amino acid
  MOD_RES (19)..(22): Variable amino acid that may or may not be present
  MOD_RES (23)..(25): Variable amino acid
  MOD_RES (27)..(27): Variable amino acid
  MOD_RES (28)..(28): Variable amino acid that may or may not be present
  MOD_RES (29)..(29): Variable amino acid
  MOD_RES (31)..(31): Variable amino acid
  MOD_RES (33)..(34): Variable amino acid
  MOD_RES (35)..(42): Variable amino acid that may or may not be present
  MOD_RES (43)..(46): Variable amino acid
  MOD_RES (48)..(51): Variable amino acid
  MOD_RES (53)..(54): Variable amino acid
  MOD_RES (55)..(59): Variable amino acid that may or may not be present
  MOD_RES (60)..(61): Variable amino acid
  MOD_RES (63)..(65): Variable amino acid
  MOD_RES (66)..(68): Variable amino acid that may or may not be present
  MOD_RES (69)..(76): Variable amino acid
  MOD_RES (79)..(79): Variable amino acid
  MOD_RES (80)..(81): Variable amino acid that may or may not be present
  MOD_RES (82)..(82): Variable amino acid
CXXXXXXXXXXXXWXXXXXXXXXXXCXXXCXCXXXXXXXXXXXXXXCXXXXCXXXXXXXXXCXXXXXXXXXXXXXXCCXXXXC

SEQ ID NO: 106 - protein, 83 aa, Artificial Sequence
  Description of Artificial Sequence: Synthetic amino acid sequence
  MOD_RES (2)..(18): Variable amino acid
  MOD_RES (19)..(22): Variable amino acid that may or may not be present
  MOD_RES (23)..(25): Variable amino acid
  MOD_RES (27)..(27): Variable amino acid
  MOD_RES (28)..(28): Variable amino acid that may or may not be present
  MOD_RES (29)..(29): Variable amino acid
  MOD_RES (31)..(31): Variable amino acid
  MOD_RES (33)..(34): Variable amino acid
  MOD_RES (35)..(42): Variable amino acid that may or may not be present
  MOD_RES (43)..(46): Variable amino acid
  MOD_RES (48)..(51): Variable amino acid
  MOD_RES (53)..(54): Variable amino acid
  MOD_RES (55)..(59): Variable amino acid that may or may not be present
  MOD_RES (60)..(61): Variable amino acid
  MOD_RES (63)..(65): Variable amino acid
  MOD_RES (66)..(68): Variable amino acid that may or may not be present
  MOD_RES (69)..(76): Variable amino acid
  MOD_RES (79)..(79): Variable amino acid
  MOD_RES (80)..(81): Variable amino acid that may or may not be present
  MOD_RES (82)..(82): Variable amino acid
CXXXXXXXXXXXXXXXXXXXXXXXXCXXXCXCXXXXXXXXXXXXXXCXXXXCXXXXXXXXXCXXXXXXXXXXXXXXCCXXXXC

SEQ ID NO: 107 - protein, 32 aa, Artificial Sequence
  Description of Artificial Sequence: Synthetic amino acid sequence
  MOD_RES (2)..(7): Variable amino acid
  MOD_RES (9)..(13): Variable amino acid
  MOD_RES (16)..(19): Variable amino acid
  MOD_RES (21)..(23): Variable amino acid
  MOD_RES (24)..(26): Variable amino acid that may or may not be present
  MOD_RES (27)..(27): Variable amino acid
  MOD_RES (28)..(29): Variable amino acid that may or may not be present
  MOD_RES (30)..(30): Variable amino acid
  MOD_RES (31)..(31): Trp, Tyr, Leu, Phe or Ile
CXXXXXXCXXXXXCCXXXXCXXXXXXXXXXXC

SEQ ID NO: 108 - protein, 32 aa, Artificial Sequence; identical to SEQ ID NO: 107
  Description of Artificial Sequence: Synthetic amino acid sequence
  MOD_RES (2)..(7): Variable amino acid
  MOD_RES (9)..(13): Variable amino acid
  MOD_RES (16)..(19): Variable amino acid
  MOD_RES (21)..(23): Variable amino acid
  MOD_RES (24)..(26): Variable amino acid that may or may not be present
  MOD_RES (27)..(27): Variable amino acid
  MOD_RES (28)..(29): Variable amino acid that may or may not be present
  MOD_RES (30)..(31): Variable amino acid

SEQ ID NO: 109 - protein, 25 aa, Artificial Sequence
  Description of Artificial Sequence: Synthetic amino acid sequence
  MOD_RES (2)..(2): Variable amino acid
  MOD_RES (4)..(4): Variable amino acid
  MOD_RES (7)..(9): Variable amino acid
  MOD_RES (11)..(16): Variable amino acid
  MOD_RES (19)..(19): Variable amino acid
  MOD_RES (21)..(23): Variable amino acid
CXEXCVXXXCXXXXXXGCXCXXXVC

SEQ ID NO: 110 - protein, 25 aa, Artificial Sequence
  Description of Artificial Sequence: Synthetic amino acid sequence
  MOD_RES (2)..(4): Variable amino acid
  MOD_RES (6)..(9): Variable amino acid
  MOD_RES (11)..(17): Variable amino acid
  MOD_RES (19)..(19): Variable amino acid
  MOD_RES (21)..(24): Variable amino acid
CXXXCXXXXCXXXXXXXCXCXXXXC

SEQ ID NO: 111 - protein, 17 aa, Artificial Sequence
  Description of Artificial Sequence: Synthetic amino acid sequence
  MOD_RES (2)..(2): Variable amino acid
  MOD_RES (6)..(6): Variable amino acid
  MOD_RES (9)..(12): Variable amino acid
  MOD_RES (15)..(15): Variable amino acid
CXFCCXCCXXXXCGXCC

SEQ ID NO: 112 - protein, 17 aa, Artificial Sequence
  Description of Artificial Sequence: Synthetic amino acid sequence
  MOD_RES (2)..(3): Variable amino acid
  MOD_RES (6)..(6): Variable amino acid
  MOD_RES (9)..(12): Variable amino acid
  MOD_RES (14)..(15): Variable amino acid
CXXCCXCCXXXXCXXCC

SEQ ID NO: 113 - protein, 44 aa, Artificial Sequence
  Description of Artificial Sequence: Synthetic amino acid sequence
  MOD_RES (2)..(6): Variable amino acid
  MOD_RES (10)..(11): Variable amino acid
  MOD_RES (19)..(19): Variable amino acid
  MOD_RES (21)..(23): Variable amino acid
  MOD_RES (26)..(26): Variable amino acid
  MOD_RES (28)..(28): Variable amino acid
  MOD_RES (30)..(30): Variable amino acid
  MOD_RES (33)..(40): Variable amino acid
  MOD_RES (42)..(43): Variable amino acid
CXXXXXWCGXXEDCCCPMXCXXXWYXQXGXCQXXXXXXXXKXXC

SEQ ID NO: 114 - protein, 44 aa, Artificial Sequence
  Description of Artificial Sequence: Synthetic amino acid sequence
  MOD_RES (2)..(6): Variable amino acid
  MOD_RES (9)..(13): Variable amino acid
  MOD_RES (17)..(19): Variable amino acid
  MOD_RES (21)..(23): Variable amino acid
  MOD_RES (25)..(30): Variable amino acid
  MOD_RES (32)..(43): Variable amino acid
CXXXXXWCXXXXXCCCXXXCXXXWXXXXXXCXXXXXXXXXXXXC

SEQ ID NO: 115 - protein, 44 aa, Artificial Sequence
  Description of Artificial Sequence: Synthetic amino acid sequence
  MOD_RES (2)..(7): Variable amino acid
  MOD_RES (9)..(13): Variable amino acid
  MOD_RES (17)..(19): Variable amino acid
  MOD_RES (21)..(30): Variable amino acid
  MOD_RES (32)..(43): Variable amino acid
CXXXXXXCXXXXXCCCXXXCXXXXXXXXXXCXXXXXXXXXXXXC

SEQ ID NO: 116 - protein, 26 aa, Artificial Sequence
  Description of Artificial Sequence: Synthetic amino acid sequence
  MOD_RES (2)..(3): Variable amino acid
  MOD_RES (5)..(7): Variable amino acid
  MOD_RES (9)..(16): Variable amino acid
  MOD_RES (18)..(20): Variable amino acid
  MOD_RES (21)..(22): Variable amino acid that may or may not be present
  MOD_RES (23)..(23): Variable amino acid
  MOD_RES (25)..(25): Variable amino acid
CXXCXXXCXXXXXXXXCXXXXXXCXC

SEQ ID NO: 117 - protein, 30 aa, Artificial Sequence
  Description of Artificial Sequence: Synthetic amino acid sequence
  MOD_RES (2)..(6): Variable amino acid
  MOD_RES (8)..(10): Variable amino acid
  MOD_RES (12)..(16): Variable amino acid
  MOD_RES (17)..(17): Variable amino acid that may or may not be present
  MOD_RES (18)..(22): Variable amino acid
  MOD_RES (24)..(27): Variable amino acid
  MOD_RES (29)..(29): Variable amino acid
CXXXXXCXXXCXXXXXXXXXXXCXXXXCXC

SEQ ID NO: 118 - protein, 30 aa, Artificial Sequence
  Description of Artificial Sequence: Synthetic amino acid sequence
  MOD_RES (2)..(6): Variable amino acid
  MOD_RES (8)..(10): Variable amino acid
  MOD_RES (12)..(16): Variable amino acid
  MOD_RES (17)..(17): Variable amino acid that may or may not be present
  MOD_RES (18)..(20): Variable amino acid
  MOD_RES (24)..(26): Variable amino acid
  MOD_RES (29)..(29): Variable amino acid
CXXXXXCXXXCXXXXXXXXXGKCXXXKCXC

SEQ ID NO: 119 - protein, 27 aa, Artificial Sequence
  Description of Artificial Sequence: Synthetic amino acid sequence
  MOD_RES (3)..(7): Variable amino acid
  MOD_RES (9)..(10): Variable amino acid
  MOD_RES (12)..(12): Variable amino acid
  MOD_RES (15)..(17): Variable amino acid
  MOD_RES (19)..(24): Variable amino acid
  MOD_RES (25)..(25): Variable amino acid that may or may not be present
  MOD_RES (26)..(26): Variable amino acid
CPXXXXXCXXDXDCXXXCXCXXXXXXC

SEQ ID NO: 120 - protein, 27 aa, Artificial Sequence
  Description of Artificial Sequence: Synthetic amino acid sequence
  MOD_RES (3)..(7): Variable amino acid
  MOD_RES (9)..(13): Variable amino acid
  MOD_RES (15)..(17): Variable amino acid
  MOD_RES (19)..(19): Variable amino acid
  MOD_RES (21)..(24): Variable amino acid
  MOD_RES (25)..(25): Variable amino acid that may or may not be present
  MOD_RES (26)..(26): Variable amino acid
CPXXXXXCXXXXXCXXXCXCXXXXXXC

SEQ ID NO: 121 - protein, 27 aa, Artificial Sequence
  Description of Artificial Sequence: Synthetic amino acid sequence
  MOD_RES (2)..(7): Variable amino acid
  MOD_RES (9)..(13): Variable amino acid
  MOD_RES (15)..(17): Variable amino acid
  MOD_RES (19)..(19): Variable amino acid
  MOD_RES (21)..(24): Variable amino acid
  MOD_RES (25)..(25): Variable amino acid that may or may not be present
  MOD_RES (26)..(26): Variable amino acid
CXXXXXXCXXXXXCXXXCXCXXXXXXC

SEQ ID NO: 122 - protein, 37 aa, Artificial Sequence
  Description of Artificial Sequence: Synthetic amino acid sequence
  MOD_RES (3)..(3): Variable amino acid
  MOD_RES (6)..(10): Variable amino acid
  MOD_RES (11)..(11): Variable amino acid that may or may not be present
  MOD_RES (12)..(15): Variable amino acid
  MOD_RES (17)..(18): Variable amino acid
  MOD_RES (20)..(28): Variable amino acid
  MOD_RES (30)..(32): Variable amino acid
  MOD_RES (34)..(35): Variable amino acid
CCXDGXXXXXXXXXXCXXRXXXXXXXXXCXXXFXXCC

SEQ ID NO: 123 - protein, 37 aa, Artificial Sequence
  Description of Artificial Sequence: Synthetic amino acid sequence
  MOD_RES (3)..(10): Variable amino acid
  MOD_RES (11)..(11): Variable amino acid that may or may not be present
  MOD_RES (12)..(15): Variable amino acid
  MOD_RES (17)..(28): Variable amino acid
  MOD_RES (30)..(35): Variable amino acid
CCXXXXXXXXXXXXXCXXXXXXXXXXXXCXXXXXXCC

SEQ ID NO: 124 - protein, 37 aa, Artificial Sequence
  Description of Artificial Sequence: Synthetic amino acid sequence
  MOD_RES (2)..(2): Variable amino acid
  MOD_RES (4)..(6): Variable amino acid
  MOD_RES (9)..(9): Variable amino acid
  MOD_RES (11)..(13): Variable amino acid
  MOD_RES (16)..(16): Variable amino acid
  MOD_RES (18)..(18): Variable amino acid
  MOD_RES (20)..(23): Variable amino acid
  MOD_RES (25)..(25): Variable amino acid
  MOD_RES (27)..(32): Variable amino acid
  MOD_RES (36)..(36): Variable amino acid
CXSXXXPCXNXXXCCXGXCXXXXWXCXXXXXXCSKXC

SEQ ID NO: 125 - protein, 37 aa, Artificial Sequence
  Description of Artificial Sequence: Synthetic amino acid sequence
  MOD_RES (2)..(6): Variable amino acid
  MOD_RES (9)..(13): Variable amino acid
  MOD_RES (16)..(18): Variable amino acid
  MOD_RES (20)..(23): Variable amino acid
  MOD_RES (25)..(25): Variable amino acid
  MOD_RES (27)..(32): Variable amino acid
  MOD_RES (34)..(36): Variable amino acid
CXXXXXPCXXXXXCCXXXCXXXXWXCXXXXXXCXXXC

SEQ ID NO: 126 - protein, 37 aa, Artificial Sequence
  Description of Artificial Sequence: Synthetic amino acid sequence
  MOD_RES (2)..(7): Variable amino acid
  MOD_RES (9)..(13): Variable amino acid
  MOD_RES (16)..(18): Variable amino acid
  MOD_RES (20)..(25): Variable amino acid
  MOD_RES (27)..(32): Variable amino acid
  MOD_RES (34)..(36): Variable amino acid
CXXXXXXCXXXXXCCXXXCXXXXXXCXXXXXXCXXXC

SEQ ID NO: 127 - protein, 40 aa, Artificial Sequence
  Description of Artificial Sequence: Synthetic amino acid sequence
  MOD_RES (2)..(3): Variable amino acid
  MOD_RES (5)..(5): Variable amino acid
  MOD_RES (6)..(6): Trp, Tyr, Leu or Phe
  MOD_RES (7)..(8): Variable amino acid
  MOD_RES (10)..(14): Variable amino acid
  MOD_RES (18)..(18): Variable amino acid
  MOD_RES (20)..(20): Variable amino acid
  MOD_RES (23)..(24): Variable amino acid
  MOD_RES (25)..(26): Variable amino acid that may or may not be present
  MOD_RES (28)..(35): Variable amino acid
  MOD_RES (37)..(38): Variable amino acid
CXXWXXXXCXXXXXDCGXGXREXXXXCXXXXXXXXCXXPC

SEQ ID NO: 128 - protein, 40 aa, Artificial Sequence
  Description of Artificial Sequence: Synthetic amino acid sequence
  MOD_RES (2)..(3): Variable amino acid
  MOD_RES (5)..(8): Variable amino acid
  MOD_RES (10)..(15): Variable amino acid
  MOD_RES (17)..(24): Variable amino acid
  MOD_RES (25)..(26): Variable amino acid that may or may not be present
  MOD_RES (28)..(35): Variable amino acid
  MOD_RES (37)..(38): Variable amino acid
CXXWXXXXCXXXXXXCXXXXXXXXXXCXXXXXXXXCXXPC

SEQ ID NO: 129 - protein, 40 aa, Artificial Sequence
  Description of Artificial Sequence: Synthetic amino acid sequence
  MOD_RES (2)..(8): Variable amino acid
  MOD_RES (10)..(15): Variable amino acid
  MOD_RES (17)..(24): Variable amino acid
  MOD_RES (25)..(26): Variable amino acid that may or may not be present
  MOD_RES (28)..(35): Variable amino acid
  MOD_RES (37)..(39): Variable amino acid
CXXXXXXXCXXXXXXCXXXXXXXXXXCXXXXXXXXCXXXC

SEQ ID NO: 130 - protein, 37 aa, Artificial Sequence
  Description of Artificial Sequence: Synthetic amino acid sequence
  MOD_RES (2)..(2): Variable amino acid
  MOD_RES (4)..(6): Variable amino acid
  MOD_RES (8)..(9): Variable amino acid
  MOD_RES (12)..(12): Variable amino acid
  MOD_RES (14)..(15): Variable amino acid
  MOD_RES (17)..(18): Variable amino acid
  MOD_RES (21)..(23): Variable amino acid
  MOD_RES (25)..(27): Variable amino acid
  MOD_RES (29)..(29): Variable amino acid
  MOD_RES (31)..(34): Variable amino acid
  MOD_RES (36)..(36): Variable amino acid
CXDXXXCXXYGXYXXCXXCCXXXGXXXGXCXXXXCXC

SEQ ID NO: 131 - protein, 37 aa, Artificial Sequence
  Description of Artificial Sequence: Synthetic amino acid sequence
  MOD_RES (2)..(6): Variable amino acid
  MOD_RES (8)..(15): Variable amino acid
  MOD_RES (17)..(18): Variable amino acid
  MOD_RES (21)..(29): Variable amino acid
  MOD_RES (31)..(34): Variable amino acid
  MOD_RES (36)..(36): Variable amino acid
CXXXXXCXXXXXXXXCXXCCXXXXXXXXXCXXXXCXC

SEQ ID NO: 132 - protein, 65 aa, Artificial Sequence
  Description of Artificial Sequence: Synthetic amino acid sequence
  MOD_RES (2)..(6): Variable amino acid
  MOD_RES (7)..(7): Variable amino acid that may or may not be present
  MOD_RES (8)..(8): Variable amino acid
  MOD_RES (9)..(9): Variable amino acid that may or may not be present
  MOD_RES (10)..(14): Variable amino acid
  MOD_RES (17)..(17): Variable amino acid
  MOD_RES (19)..(21): Variable amino acid
  MOD_RES (23)..(23): Tyr or Phe
  MOD_RES (24)..(24): Variable amino acid
  MOD_RES (26)..(29): Variable amino acid
  MOD_RES (30)..(31): Variable amino acid that may or may not be present
  MOD_RES (33)..(41): Variable amino acid
  MOD_RES (44)..(45): Variable amino acid
  MOD_RES (49)..(52): Variable amino acid
  MOD_RES (53)..(53): Variable amino acid that may or may not be present
  MOD_RES (54)..(58): Variable amino acid
  MOD_RES (61)..(62): Variable amino acid
  MOD_RES (64)..(64): Variable amino acid
CXXXXXXXXXXXXXCPXGXXXCXXKXXXXXXCXXXXXXXXXGCXXTCPXXXXXXXXXXCCXXDXC

SEQ ID NO: 133 - protein, 66 aa, Artificial Sequence
  Description of Artificial Sequence: Synthetic amino acid sequence
  MOD_RES (2)..(6): Variable amino acid
  MOD_RES (7)..(7): Variable amino acid that may or may not be present
  MOD_RES (8)..(8): Variable amino acid
  MOD_RES (9)..(9): Variable amino acid that may or may not be present
  MOD_RES (10)..(14): Variable amino acid
  MOD_RES (16)..(21): Variable amino acid
  MOD_RES (23)..(30): Variable amino acid
  MOD_RES (31)..(32): Variable amino acid that may or may not be present
  MOD_RES (34)..(42): Variable amino acid
  MOD_RES (45)..(47): Variable amino acid
  MOD_RES (50)..(53): Variable amino acid
  MOD_RES (54)..(54): Variable amino acid that may or may not be present
  MOD_RES (55)..(59): Variable amino acid
  MOD_RES (62)..(65): Variable amino acid
CXXXXXXXXXXXXXCXXXXXXCXXXXXXXXXXCXXXXXXXXXGCXXXCPXXXXXXXXXXCCXXXXC

SEQ ID NO: 134 - protein, 65 aa, Artificial Sequence; identical to SEQ ID NO: 38
  Description of Artificial Sequence: Synthetic amino acid sequence
  MOD_RES (2)..(6): Variable amino acid
  MOD_RES (7)..(7): Variable amino acid that may or may not be present
  MOD_RES (8)..(8): Variable amino acid
  MOD_RES (9)..(9): Variable amino acid that may or may not be present
  MOD_RES (10)..(14): Variable amino acid
  MOD_RES (16)..(21): Variable amino acid
  MOD_RES (23)..(29): Variable amino acid
  MOD_RES (30)..(31): Variable amino acid that may or may not be present
  MOD_RES (33)..(42): Variable amino acid
  MOD_RES (44)..(46): Variable amino acid
  MOD_RES (48)..(52): Variable amino acid
  MOD_RES (53)..(53): Variable amino acid that may or may not be present
  MOD_RES (54)..(58): Variable amino acid
  MOD_RES (61)..(64): Variable amino acid

SEQ ID NO: 135 - protein, 41 aa, Artificial Sequence
  Description of Artificial Sequence: Synthetic amino acid sequence
  MOD_RES (3)..(5): Variable amino acid
  MOD_RES (6)..(7): Variable amino acid that may or may not be present
  MOD_RES (8)..(12): Variable amino acid
  MOD_RES (14)..(16): Variable amino acid
  MOD_RES (17)..(19): Variable amino acid that may or may not be present
  MOD_RES (21)..(22): Variable amino acid
  MOD_RES (24)..(25): Variable amino acid
  MOD_RES (27)..(30): Variable amino acid
  MOD_RES (34)..(36): Variable amino acid
  MOD_RES (38)..(40): Variable amino acid
CPXXXXXXXXXXCXXXXXXCXXDXXCXXXXKCCXXXCXXXC

SEQ ID NO: 136 - protein, 40 aa, Artificial Sequence
  Description of Artificial Sequence: Synthetic amino acid sequence
  MOD_RES (3)..(5): Variable amino acid
  MOD_RES (6)..(7): Variable amino acid that may or may not be present
  MOD_RES (8)..(12): Variable amino acid
  MOD_RES (14)..(16): Variable amino acid
  MOD_RES (17)..(19): Variable amino acid that may or may not be present
  MOD_RES (21)..(22): Variable amino acid
  MOD_RES (24)..(25): Variable amino acid
  MOD_RES (27)..(30): Variable amino acid
  MOD_RES (33)..(35): Variable amino acid
  MOD_RES (37)..(39): Variable amino acid
CPXXXXXXXXXXCXXXXXXCXXDXXCXXXXCCXXXCXXXC

SEQ ID NO: 137 - protein, 41 aa, Artificial Sequence
  Description of Artificial Sequence: Synthetic amino acid sequence
  MOD_RES (2)..(5): Variable amino acid
  MOD_RES (6)..(7): Variable amino acid that may or may not be present
  MOD_RES (8)..(12): Variable amino acid
  MOD_RES (14)..(16): Variable amino acid
  MOD_RES (17)..(19): Variable amino acid that may or may not be present
  MOD_RES (21)..(25): Variable amino acid
  MOD_RES (27)..(31): Variable amino acid
  MOD_RES (34)..(36): Variable amino acid
  MOD_RES (38)..(40): Variable amino acid
CXXXXXXXXXXXCXXXXXXCXXXXXCXXXXXCCXXXCXXXC

SEQ ID NO: 138 - protein, 34 aa, Artificial Sequence
  Description of Artificial Sequence: Synthetic amino acid sequence
  MOD_RES (2)..(3): Variable amino acid
  MOD_RES (4)..(4): Variable amino acid that may or may not be present
  MOD_RES (5)..(5): Variable amino acid
  MOD_RES (7)..(8): Variable amino acid
  MOD_RES (10)..(11): Variable amino acid
  MOD_RES (13)..(15): Variable amino acid
  MOD_RES (18)..(19): Variable amino acid
  MOD_RES (21)..(21): Variable amino acid that may or may not be present
  MOD_RES (22)..(22): Variable amino acid
  MOD_RES (24)..(24): Variable amino acid
  MOD_RES (26)..(30): Variable amino acid
  MOD_RES (33)..(33): Variable amino acid
CXXXXYXXCXXGXXXCCXXRXXCXCXXXXXNCXC

SEQ ID NO: 139 - protein, 34 aa, Artificial Sequence
  Description of Artificial Sequence: Synthetic amino acid sequence
  MOD_RES (2)..(3): Variable amino acid
  MOD_RES (4)..(4): Variable amino acid that may or may not be present
  MOD_RES (5)..(8): Variable amino acid
  MOD_RES (10)..(15): Variable amino acid
  MOD_RES (18)..(20): Variable amino acid
  MOD_RES (21)..(21): Variable amino acid that may or may not be present
  MOD_RES (22)..(22): Variable amino acid
  MOD_RES (24)..(24): Variable amino acid
  MOD_RES (26)..(30): Variable amino acid
  MOD_RES (33)..(33): Variable amino acid
CXXXXXXXCXXXXXXCCXXXXXCXCXXXXXNCXC

SEQ ID NO: 140 - protein, 34 aa, Artificial Sequence
  Description of Artificial Sequence: Synthetic amino acid sequence
  MOD_RES (2)..(3): Variable amino acid
  MOD_RES (4)..(4): Variable amino acid that may or may not be present
  MOD_RES (5)..(8): Variable amino acid
  MOD_RES (10)..(15): Variable amino acid
  MOD_RES (18)..(20): Variable amino acid
  MOD_RES (21)..(21): Variable amino acid that may or may not be present
  MOD_RES (22)..(22): Variable amino acid
  MOD_RES (24)..(24): Variable amino acid
  MOD_RES (26)..(31): Variable amino acid
  MOD_RES (33)..(33): Variable amino acid
CXXXXXXXCXXXXXXCCXXXXXCXCXXXXXXCXC

SEQ ID NO: 141 - protein, 32 aa, Artificial Sequence
  Description of Artificial Sequence: Synthetic amino acid sequence
  MOD_RES (2)..(7): Variable amino acid
  MOD_RES (9)..(9): Variable amino acid
  MOD_RES (12)..(15): Variable amino acid
  MOD_RES (18)..(18): Variable amino acid
  MOD_RES (20)..(20): Variable amino acid
  MOD_RES (23)..(23): Variable amino acid
  MOD_RES (25)..(27): Variable amino acid
  MOD_RES (29)..(29): Variable amino acid
  MOD_RES (31)..(31): Variable amino acid
CXXXXXXCXDWXXXXCCXGXYCXCXXXPXCXC

SEQ ID NO: 142 - protein, 32 aa, Artificial Sequence
  Description of Artificial Sequence: Synthetic amino acid sequence
  MOD_RES (2)..(7): Variable amino acid
  MOD_RES (9)..(10): Variable amino acid
  MOD_RES (12)..(15): Variable amino acid
  MOD_RES (18)..(21): Variable amino acid
  MOD_RES (23)..(23): Variable amino acid
  MOD_RES (25)..(29): Variable amino acid
  MOD_RES (31)..(31): Variable amino acid
CXXXXXXCXXWXXXXCCXXXXCXCXXXXXCXC

SEQ ID NO: 143 - protein, 32 aa, Artificial Sequence
  Description of Artificial Sequence: Synthetic amino acid sequence
  MOD_RES (2)..(7): Variable amino acid
  MOD_RES (9)..(15): Variable amino acid
  MOD_RES (18)..(21): Variable amino acid
  MOD_RES (23)..(23): Variable amino acid
  MOD_RES (25)..(29): Variable amino acid
  MOD_RES (31)..(31): Variable amino acid
CXXXXXXCXXXXXXXCCXXXXCXCXXXXXCXC

SEQ ID NO: 144 - protein, 41 aa, Artificial Sequence
  Description of Artificial Sequence: Synthetic amino acid sequence
  MOD_RES (2)..(4): Variable amino acid
  MOD_RES (7)..(8): Variable amino acid
  MOD_RES (11)..(11): Variable amino acid
  MOD_RES (13)..(14): Variable amino acid
  MOD_RES (16)..(16): Variable amino acid
  MOD_RES (18)..(18): Variable amino acid
  MOD_RES (20)..(20): Variable amino acid
  MOD_RES (22)..(23): Variable amino acid
  MOD_RES (25)..(25): Variable amino acid
  MOD_RES (27)..(28): Variable amino acid
  MOD_RES (31)..(36): Variable amino acid
  MOD_RES (38)..(40): Variable amino acid
CXXXCRXXYDXCXXCXGXWXGXXGXCXXHCXXXXXXCXXXC

SEQ ID NO: 145 - protein, 41 aa, Artificial Sequence
  Description of Artificial Sequence: Synthetic amino acid sequence
  MOD_RES (2)..(4): Variable amino acid
  MOD_RES (6)..(11): Variable amino acid
  MOD_RES (13)..(14): Variable amino acid
  MOD_RES (16)..(18): Variable amino acid
  MOD_RES (20)..(25): Variable amino acid
  MOD_RES (27)..(29): Variable amino acid
  MOD_RES (31)..(36): Variable amino acid
  MOD_RES (38)..(40): Variable amino acid
CXXXCXXXXXXCXXCXXXWXXXXXXCXXXCXXXXXXCXXXC

SEQ ID NO: 146 - protein, 41 aa, Artificial Sequence
  Description of Artificial Sequence: Synthetic amino acid sequence
  MOD_RES (2)..(4): Variable amino acid
  MOD_RES (6)..(11): Variable amino acid
  MOD_RES (13)..(14): Variable amino acid
  MOD_RES (16)..(25): Variable amino acid
  MOD_RES (27)..(29): Variable amino acid
  MOD_RES (31)..(36): Variable amino acid
  MOD_RES (38)..(40): Variable amino acid
CXXXCXXXXXXCXXCXXXXXXXXXXCXXXCXXXXXXCXXXC

SEQ ID NO: 147 - protein, 33 aa, Artificial Sequence
  Description of Artificial Sequence: Synthetic amino acid sequence
  MOD_RES (2)..(2): Variable amino acid
  MOD_RES (4)..(4): Variable amino acid
  MOD_RES (6)..(6): Variable amino acid
  MOD_RES (11)..(13): Variable amino acid
  MOD_RES (16)..(18): Variable amino acid
  MOD_RES (20)..(26): Variable amino acid
  MOD_RES (28)..(31): Variable amino acid
CXPXGXPCPYXXXCCXXXCXXXXXXXGXXXXRC

SEQ ID NO: 148 - protein, 33 aa, Artificial Sequence
  Description of Artificial Sequence: Synthetic amino acid sequence
  MOD_RES (2)..(7): Variable amino acid
  MOD_RES (9)..(13): Variable amino acid
  MOD_RES (16)..(18): Variable amino acid
  MOD_RES (20)..(32): Variable amino acid
CXXXXXXCXXXXXCCXXXCXXXXXXXXXXXXXC

SEQ ID NO: 149 - protein, 33 aa, Artificial Sequence
  Description of Artificial Sequence: Synthetic amino acid sequence
  MOD_RES (2)..(2): Variable amino acid
  MOD_RES (4)..(4): Variable amino acid
  MOD_RES (6)..(6): Variable amino acid
  MOD_RES (10)..(13): Variable amino acid
  MOD_RES (16)..(18): Variable amino acid
  MOD_RES (20)..(32): Variable amino acid
CXPXGXPCPXXXXCCXXXCXXXXXXXXXXXXXC

SEQ ID NO: 150 - protein, 54 aa, Artificial Sequence
  Description of Artificial Sequence: Synthetic amino acid sequence
  MOD_RES (2)..(12): Variable amino acid
  MOD_RES (15)..(15): Variable amino acid
  MOD_RES (17)..(21): Variable amino acid
  MOD_RES (23)..(23): Variable amino acid
  MOD_RES (26)..(27): Variable amino acid
  MOD_RES (32)..(38): Variable amino acid
  MOD_RES (40)..(40): Variable amino acid
  MOD_RES (42)..(42): Variable amino acid
  MOD_RES (44)..(46): Variable amino acid
  MOD_RES (49)..(51): Variable amino acid
CXXXXXXXXXXXCPXGXXXXXCXCGXXCGSWXXXXXXXCXCXCXXXDWXXXRCC

SEQ ID NO: 151 - protein, 54 aa, Artificial Sequence
  Description of Artificial Sequence: Synthetic amino acid sequence
  MOD_RES (2)..(12): Variable amino acid
  MOD_RES (15)..(21): Variable amino acid
  MOD_RES (23)..(23): Variable amino acid
  MOD_RES (25)..(27): Variable amino acid
  MOD_RES (29)..(30): Variable amino acid
  MOD_RES (32)..(38): Variable amino acid
  MOD_RES (40)..(40): Variable amino acid
  MOD_RES (42)..(42): Variable amino acid
  MOD_RES (44)..(47): Variable amino acid
  MOD_RES (49)..(52): Variable amino acid
CXXXXXXXXXXXCPXXXXXXXCXCXXXCXXWXXXXXXXCXCXCXXXXWXXXXCC

SEQ ID NO: 152 - protein, 54 aa, Artificial Sequence
  Description of Artificial Sequence: Synthetic amino acid sequence
  MOD_RES (2)..(12): Variable amino acid
  MOD_RES (14)..(21): Variable amino acid
  MOD_RES (23)..(23): Variable amino acid
  MOD_RES (25)..(27): Variable amino acid
  MOD_RES (29)..(38): Variable amino acid
  MOD_RES (40)..(40): Variable amino acid
  MOD_RES (42)..(42): Variable amino acid
  MOD_RES (44)..(52): Variable amino acid
CXXXXXXXXXXXCXXXXXXXXCXCXXXCXXXXXXXXXXCXCXCXXXXXXXXXCC

SEQ ID NO: 153 - protein, 24 aa, Artificial Sequence
  Description of Artificial Sequence: Synthetic amino acid sequence
  MOD_RES (2)..(2): Variable amino acid
  MOD_RES (3)..(4): Variable amino acid that may or may not be present
  MOD_RES (5)..(7): Variable amino acid
  MOD_RES (9)..(13): Variable amino acid
  MOD_RES (14)..(14): Asn or Asp
  MOD_RES (16)..(16): Variable amino acid
  MOD_RES (18)..(18): Variable amino acid
  MOD_RES (19)..(19): Trp, Tyr, Leu or Phe
  MOD_RES (22)..(22): Variable amino acid
CXXXXXXCXXXXXXGXCXXDGXDC

SEQ ID NO: 154 - protein, 24 aa, Artificial Sequence
  Description of Artificial Sequence: Synthetic amino acid sequence
  MOD_RES (2)..(2): Variable amino acid
  MOD_RES (3)..(4): Variable amino acid that may or may not be present
  MOD_RES (5)..(7): Variable amino acid
  MOD_RES (9)..(16): Variable amino acid
  MOD_RES (18)..(19): Variable amino acid
  MOD_RES (22)..(22): Variable amino acid
CXXXXXXCXXXXXXXXCXXDGXDC

SEQ ID NO: 155 - protein, 24 aa, Artificial Sequence
  Description of Artificial Sequence: Synthetic amino acid sequence
  MOD_RES (2)..(2): Variable amino acid
  MOD_RES (3)..(4): Variable amino acid that may or may not be present
  MOD_RES (5)..(7): Variable amino acid
  MOD_RES (9)..(16): Variable amino acid
  MOD_RES (18)..(23): Variable amino acid
CXXXXXXCXXXXXXXXCXXXXXXC

SEQ ID NO: 156 - protein, 43 aa, Artificial Sequence
  Description of Artificial Sequence: Synthetic amino acid sequence
  MOD_RES (2)..(5): Variable amino acid
  MOD_RES (6)..(6): Tyr or Phe
  MOD_RES (7)..(8): Variable amino acid
  MOD_RES (9)..(10): Variable amino acid that may or may not be present
  MOD_RES (11)..(13): Variable amino acid
  MOD_RES (14)..(14): Variable amino acid that may or may not be present
  MOD_RES (15)..(16): Variable amino acid
  MOD_RES (18)..(19): Variable amino acid
  MOD_RES (21)..(22): Variable amino acid
  MOD_RES (24)..(25): Variable amino acid
  MOD_RES (26)..(27): Variable amino acid that may or may not be present
  MOD_RES (29)..(34): Variable amino acid
  MOD_RES (36)..(40): Variable amino acid
  MOD_RES (42)..(42): Variable amino acid
CXXXXXXXXXXXXXXXCXXCXXCXXXXGXXXXXXCXXXXXTXC

SEQ ID NO: 157 - protein, 43 aa, Artificial Sequence
  Description of Artificial Sequence: Synthetic amino acid sequence
  MOD_RES (2)..(8): Variable amino acid
  MOD_RES (9)..(10): Variable amino acid that may or may not be present
  MOD_RES (11)..(13): Variable amino acid
  MOD_RES (14)..(14): Variable amino acid that may or may not be present
  MOD_RES (15)..(16): Variable amino acid
  MOD_RES (18)..(19): Variable amino acid
  MOD_RES (21)..(22): Variable amino acid
  MOD_RES (24)..(25): Variable amino acid
  MOD_RES (26)..(27): Variable amino acid that may or may not be present
  MOD_RES (28)..(34): Variable amino acid
  MOD_RES (36)..(42): Variable amino acid
CXXXXXXXXXXXXXXXCXXCXXCXXXXXXXXXXXCXXXXXXXC

SEQ ID NO: 158 - protein, 42 aa, Artificial Sequence
  Description of Artificial Sequence: Synthetic amino acid sequence
  MOD_RES (2)..(2): Variable amino acid
  MOD_RES (6)..(6): Variable amino acid
  MOD_RES (7)..(7): Tyr or Phe
  MOD_RES (8)..(14): Variable amino acid
  MOD_RES (17)..(18): Variable amino acid
  MOD_RES (20)..(25): Variable amino acid
  MOD_RES (28)..(28): Variable amino acid
  MOD_RES (31)..(33): Variable amino acid
  MOD_RES (35)..(35): Variable amino acid
  MOD_RES (37)..(40): Variable amino acid
  MOD_RES (41)..(41): Phe or Tyr
CXFPFXXXXXXXXXCTXXGXXXXXXWCXTTXXXDXDXXXXXC

SEQ ID NO: 159 - protein, 42 aa, Artificial Sequence
  Description of Artificial Sequence: Synthetic amino acid sequence
  MOD_RES (2)..(3): Variable amino acid
  MOD_RES (6)..(14): Variable amino acid
  MOD_RES (16)..(25): Variable amino acid
  MOD_RES (28)..(35): Variable amino acid
  MOD_RES (37)..(41): Variable amino acid
CXXPFXXXXXXXXXCXXXXXXXXXXWCXXXXXXXXDXXXXXC

SEQ ID NO: 160 - protein, 42 aa, Artificial Sequence
  Description of Artificial Sequence: Synthetic amino acid sequence
  MOD_RES (2)..(14): Variable amino acid
  MOD_RES (16)..(26): Variable amino acid
  MOD_RES (28)..(41): Variable amino acid
CXXXXXXXXXXXXXCXXXXXXXXXXXCXXXXXXXXXXXXXXC

SEQ ID NO: 161 - protein, 38 aa, Artificial Sequence
  Description of Artificial Sequence: Synthetic amino acid sequence
  MOD_RES (2)..(3): Variable amino acid
  MOD_RES (4)..(5): Variable amino acid that may or may not be present
  MOD_RES (6)..(9): Variable amino acid
  MOD_RES (11)..(11): Variable amino acid
  MOD_RES (14)..(16): Variable amino acid
  MOD_RES (17)..(18): Variable amino acid that may or may not be present
  MOD_RES (19)..(24): Variable amino acid
  MOD_RES (26)..(29): Variable amino acid
  MOD_RES (32)..(33): Variable amino acid
  MOD_RES (35)..(36): Variable amino acid
CXXXXXXXXYXCCXXXXXXXXXXXDXXXXWGXXNXXWC

SEQ ID NO: 162 - protein, 38 aa, Artificial Sequence
  Description of Artificial Sequence: Synthetic amino acid sequence
  MOD_RES (2)..(3): Variable amino acid
  MOD_RES (4)..(5): Variable amino acid that may or may not be present
  MOD_RES (6)..(11): Variable amino acid
  MOD_RES (14)..(16): Variable amino acid
  MOD_RES (17)..(18): Variable amino acid that may or may not be present
  MOD_RES (19)..(29): Variable amino acid
  MOD_RES (31)..(37): Variable amino acid
CXXXXXXXXXXCCXXXXXXXXXXXXXXXXWXXXXXXXC

SEQ ID NO: 163 - protein, 38 aa, Artificial Sequence
  Description of Artificial Sequence: Synthetic amino acid sequence
  MOD_RES (2)..(3): Variable amino acid
  MOD_RES (4)..(5): Variable amino acid that may or may not be present
  MOD_RES (6)..(11): Variable amino acid
  MOD_RES (14)..(16): Variable amino acid
  MOD_RES (17)..(18): Variable amino acid that may or may not be present
  MOD_RES (19)..(37): Variable amino acid
CXXXXXXXXXXCCXXXXXXXXXXXXXXXXXXXXXXXXC

SEQ ID NO: 164 - protein, 18 aa, Artificial Sequence
  Description of Artificial Sequence: Synthetic amino acid sequence
  MOD_RES (3)..(6): Variable amino acid
  MOD_RES (7)..(7): Variable amino acid that may or may not be present
  MOD_RES (9)..(12): Variable amino acid
  MOD_RES (14)..(16): Variable amino acid
CCXXXXXCXXXXPXXXCG

SEQ ID NO: 165 - protein, 17 aa, Artificial Sequence
  Description of Artificial Sequence: Synthetic amino acid sequence
  MOD_RES (3)..(6): Variable amino acid
  MOD_RES (7)..(7): Variable amino acid that may or may not be present
  MOD_RES (9)..(16): Variable amino acid
CCXXXXXCXXXXXXXXC

SEQ ID NO: 166 - protein, 18 aa, Artificial Sequence
  Description of Artificial Sequence: Synthetic amino acid sequence
  MOD_RES (4)..(7): Variable amino acid
  MOD_RES (9)..(11): Variable amino acid
  MOD_RES (13)..(14): Variable amino acid
  MOD_RES (16)..(17): Variable amino acid
CGGXXXXGXXXCXXGXXC

SEQ ID NO: 167 - protein, 18 aa, Artificial Sequence
  Description of Artificial Sequence: Synthetic amino acid sequence
  MOD_RES (4)..(7): Variable amino acid
  MOD_RES (9)..(11): Variable amino acid
  MOD_RES (13)..(17): Variable amino acid
CGGXXXXGXXXCXXXXXC

SEQ ID NO: 168 - protein, 80 aa, Artificial Sequence
  Description of Artificial Sequence: Synthetic amino acid sequence
  MOD_RES (2)..(2): Variable amino acid
  MOD_RES (3)..(4): Variable amino acid that may or may not be present
  MOD_RES (5)..(5): May or may not be present
  MOD_RES (6)..(8): Variable amino acid
  MOD_RES (10)..(16): Variable amino acid
  MOD_RES (18)..(18): Variable amino acid
  MOD_RES (20)..(21): Variable amino acid
  MOD_RES (22)..(25): Variable amino acid that may or may not be present
  MOD_RES (26)..(29): Variable amino acid
  MOD_RES (30)..(30): May or may not be present
  MOD_RES (31)..(37): Variable amino acid
  MOD_RES (43)..(44): Variable amino acid
  MOD_RES (46)..(49): Variable amino acid
  MOD_RES (51)..(52): Variable amino acid
  MOD_RES (54)..(59): Variable amino acid
  MOD_RES (60)..(60): May or may not be present
  MOD_RES (61)..(61): Variable amino acid that may or may not be present
  MOD_RES (62)..(63): Variable amino acid
  MOD_RES (66)..(66): Variable amino acid
  MOD_RES (68)..(69): Variable amino acid
  MOD_RES (71)..(72): Variable amino acid that may or may not be present
  MOD_RES (73)..(77): Variable amino acid
  MOD_RES (79)..(79): Variable amino acid
CXXXCXXXCXXXXXXXCXPXXXXXXXXXXCXXXXXXXGCGCCXXCXXXXGXXCXXXXXXDXXXGLXCXXGXXXXXXXLXC

SEQ ID NO: 169 - protein, 80 aa, Artificial Sequence
  Description of Artificial Sequence: Synthetic amino acid sequence
  MOD_RES (2)..(2): Variable amino acid
  MOD_RES (3)..(4): Variable amino acid that may or may not be present
  MOD_RES (5)..(5): May or may not be present
  MOD_RES (6)..(8): Variable amino acid
  MOD_RES (10)..(16): Variable amino acid
  MOD_RES (18)..(21): Variable amino acid
  MOD_RES (22)..(25): Variable amino acid that may or may not be present
  MOD_RES (26)..(29): Variable amino acid
  MOD_RES (30)..(30): May or may not be present
  MOD_RES (31)..(37): Variable amino acid
  MOD_RES (40)..(40): Variable amino acid
  MOD_RES (43)..(44): Variable amino acid
  MOD_RES (46)..(52): Variable amino acid
  MOD_RES (54)..(59): Variable amino acid
  MOD_RES (60)..(61): Variable amino acid that may or may not be present
  MOD_RES (62)..(66): Variable amino acid
  MOD_RES (68)..(70): Variable amino acid
  MOD_RES (71)..(72): Variable amino acid that may or may not be present
  MOD_RES (73)..(79): Variable amino acid
CXXXCXXXCXXXXXXXCXXXXXXXXXXXXCXXXXXXXGCXCCXXCXXXXXXXCXXXXXXXXXXXXXCXXXXXXXXXXXXC

SEQ ID NO: 170 - protein, 80 aa, Artificial Sequence
  Description of Artificial Sequence: Synthetic amino acid sequence
  MOD_RES (2)..(2): Variable amino acid
  MOD_RES (3)..(4): Variable amino acid that may or may not be present
  MOD_RES (5)..(5): May or may not be present
  MOD_RES (6)..(8): Variable amino acid
  MOD_RES (10)..(16): Variable amino acid
  MOD_RES (18)..(21): Variable amino acid
  MOD_RES (22)..(25): Variable amino acid that may or may not be present
  MOD_RES (26)..(29): Variable amino acid
  MOD_RES (30)..(30): May or may not be present
  MOD_RES (31)..(38): Variable amino acid
  MOD_RES (40)..(40): Variable amino acid
  MOD_RES (43)..(44): Variable amino acid
  MOD_RES (46)..(52): Variable amino acid
  MOD_RES (54)..(59): Variable amino acid
  MOD_RES (60)..(61): Variable amino acid that may or may not be present
  MOD_RES (62)..(66): Variable amino acid
  MOD_RES (68)..(70): Variable amino acid
  MOD_RES (71)..(72): Variable amino acid that may or may not be present
  MOD_RES (73)..(79): Variable amino acid
CXXXCXXXCXXXXXXXCXXXXXXXXXXXXCXXXXXXXXCXCCXXCXXXXXXXCXXXXXXXXXXXXXCXXXXXXXXXXXXC

SEQ ID NO: 171 - protein, 21 aa, Artificial Sequence
  Description of Artificial Sequence: Synthetic amino acid sequence
  MOD_RES (2)..(2): Variable amino acid
  MOD_RES (4)..(7): Variable amino acid
  MOD_RES (12)..(12): Variable amino acid
  MOD_RES (13)..(13): Tyr, Phe, Leu or Ile
  MOD_RES (14)..(14): Variable amino acid
  MOD_RES (17)..(17): Variable amino acid
  MOD_RES (19)..(20): Ile, Val or Leu
CXCXXXXDKECXXXCHXDXXW

SEQ ID NO: 172 - protein, 15 aa, Artificial Sequence
  Description of Artificial Sequence: Synthetic amino acid sequence
  MOD_RES (2)..(2): Variable amino acid
  MOD_RES (4)..(7): Variable amino acid
  MOD_RES (12)..(12): Variable amino acid
  MOD_RES (13)..(13): Tyr, Phe, Leu or Ile
  MOD_RES (14)..(14): Variable amino acid
CXCXXXXDKECXXXC

SEQ ID NO: 173 - protein, 15 aa, Artificial Sequence
  Description of Artificial Sequence: Synthetic amino acid sequence
  MOD_RES (2)..(2): Variable amino acid
  MOD_RES (4)..(10): Variable amino acid
  MOD_RES (12)..(14): Variable amino acid
CXCXXXXXXXCXXXC

SEQ ID NO: 174 - protein, 13 aa, Artificial Sequence
  Description of Artificial Sequence: Synthetic amino acid sequence
  MOD_RES (3)..(3): Variable amino acid
  MOD_RES (5)..(8): Variable amino acid
CEXCXXXXACTGC

SEQ ID NO: 175 - protein, 13 aa, Artificial Sequence
  Description of Artificial Sequence: Synthetic amino acid sequence
  MOD_RES (3)..(3): Variable amino acid
  MOD_RES (5)..(9): Variable amino acid
  MOD_RES (11)..(11): Variable amino acid
CEXCXXXXXCXGC

SEQ ID NO: 176 - protein, 13 aa, Artificial Sequence
  Description of Artificial Sequence: Synthetic amino acid sequence
  MOD_RES (2)..(3): Variable amino acid
  MOD_RES (5)..(9): Variable amino acid
  MOD_RES (11)..(12): Variable amino acid
CXXCXXXXXCXXC

SEQ ID NO: 177 - protein, 19 aa, Artificial Sequence
  Description of Artificial Sequence: Synthetic amino acid sequence
  MOD_RES (4)..(4): Variable amino acid
  MOD_RES (10)..(10): Variable amino acid
CYRXCWREGXDEETCKERC

SEQ ID NO: 178 - protein, 19 aa, Artificial Sequence
  Description of Artificial Sequence: Synthetic amino acid sequence
  MOD_RES (2)..(4): Variable amino acid
  MOD_RES (7)..(14): Variable amino acid
  MOD_RES (16)..(18): Variable amino acid
CXXXCWXXXXXXXXCXXXC

SEQ ID NO: 179 - protein, 30 aa, Artificial Sequence
  Description of Artificial Sequence: Synthetic amino acid sequence
  MOD_RES (3)..(5): Variable amino acid
  MOD_RES (7)..(8): Variable amino acid
  MOD_RES (10)..(10): Variable amino acid
  MOD_RES (12)..(13): Variable amino acid
  MOD_RES (15)..(15): Variable amino acid
  MOD_RES (18)..(18): Variable amino acid
  MOD_RES (20)..(22): Variable amino acid
  MOD_RES (24)..(25): Variable amino acid
  MOD_RES (29)..(29): Variable amino acid
DCXXXGXXCXGXXKXCCXPXXXCXXYANXC

SEQ ID NO: 180 - protein, 29 aa, Artificial Sequence
  Description of Artificial Sequence: Synthetic amino acid sequence
  MOD_RES (2)..(4): Variable amino acid
  MOD_RES (6)..(7): Variable amino acid
  MOD_RES (9)..(9): Variable amino acid
  MOD_RES (11)..(14): Variable amino acid
  MOD_RES (17)..(21): Variable amino acid
  MOD_RES (23)..(24): Variable amino acid
  MOD_RES (26)..(28): Variable amino acid
CXXXGXXCXGXXXXCCXXXXXCXXYXXXC

SEQ ID NO: 181 - protein, 28 aa, Artificial Sequence
  Description of Artificial Sequence: Synthetic amino acid sequence
  MOD_RES (2)..(7): Variable amino acid
  MOD_RES (9)..(13): Variable amino acid
  MOD_RES (16)..(20): Variable amino acid
  MOD_RES (22)..(27): Variable amino acid
CXXXXXXCXXXXXCCXXXXXCXXXXXXC

SEQ ID NO: 182 - protein, 28 aa, Artificial Sequence
  Description of Artificial Sequence: Synthetic amino acid sequence
  MOD_RES (3)..(3): Variable amino acid
  MOD_RES (4)..(4): Ile, Val, Leu or Phe
  MOD_RES (5)..(7): Variable amino acid
  MOD_RES (9)..(10): Variable amino acid
  MOD_RES (12)..(12): Variable amino acid
  MOD_RES (15)..(17): Variable amino acid
  MOD_RES (19)..(19): Variable amino acid
  MOD_RES (21)..(26): Variable amino acid
CPXXXXXCXXDXDCXXXCXCXXXXXXCG

SEQ ID NO: 183 - protein, 27 aa, Artificial Sequence
  Description of Artificial Sequence: Synthetic amino acid sequence
  MOD_RES (3)..(7): Variable amino acid
  MOD_RES (9)..(13): Variable amino acid
  MOD_RES (15)..(17): Variable amino acid
  MOD_RES (19)..(19): Variable amino acid
  MOD_RES (21)..(26): Variable amino acid
CPXXXXXCXXXXXCXXXCXCXXXXXXC

SEQ ID NO: 184 - protein, 27 aa, Artificial Sequence
  Description of Artificial Sequence: Synthetic amino acid sequence
  MOD_RES (2)..(7): Variable amino acid
  MOD_RES (9)..(13): Variable amino acid
  MOD_RES (15)..(17): Variable amino acid
  MOD_RES (19)..(19): Variable amino acid
  MOD_RES (21)..(26): Variable amino acid
CXXXXXXCXXXXXCXXXCXCXXXXXXC

SEQ ID NO: 185 - protein, 34 aa, Artificial Sequence
  Description of Artificial Sequence: Synthetic amino acid sequence
  MOD_RES (3)..(3): Variable amino acid
  MOD_RES (9)..(9): Variable amino acid
  MOD_RES (13)..(13): Variable amino acid
  MOD_RES (15)..(15): Variable amino acid
  MOD_RES (18)..(18): Variable amino acid
  MOD_RES (25)..(26): Variable amino acid
  MOD_RES (29)..(29): Variable amino acid
CDXGEQCAXRKGXRXGKXCDCPRGXXCNXFLLKC

SEQ ID NO: 186 - protein, 34 aa, Artificial Sequence
  Description of Artificial Sequence: Synthetic amino acid sequence
  MOD_RES (2)..(6): Variable amino acid
  MOD_RES (8)..(18): Variable amino acid
  MOD_RES (20)..(20): Variable amino acid
  MOD_RES (22)..(26): Variable amino acid
  MOD_RES (28)..(33): Variable amino acid
CXXXXXCXXXXXXXXXXXCXCXXXXXCXXXXXXC

SEQ ID NO: 187 - protein, 31 aa, Artificial Sequence
  Description of Artificial Sequence: Synthetic amino acid sequence
  MOD_RES (9)..(9): Variable amino acid
  MOD_RES (13)..(13): Variable amino acid
  MOD_RES (17)..(17): Variable amino acid
  MOD_RES (19)..(20): Variable amino acid
  MOD_RES (22)..(25): Variable amino acid
CVKKDELCXPYYXDCCXPXXCXXXXWWDHKC

SEQ ID NO: 188 - protein, 31 aa, Artificial Sequence
  Description of Artificial Sequence: Synthetic amino acid sequence
  MOD_RES (2)..(7): Variable amino acid
  MOD_RES (9)..(14): Variable amino acid
  MOD_RES (17)..(20): Variable amino acid
  MOD_RES (22)..(25): Variable amino acid
  MOD_RES (28)..(30): Variable amino acid
CXXXXXXCXXXXXXCCXXXXCXXXXWWXXXC

SEQ ID NO: 189 - protein, 31 aa, Artificial Sequence
  Description of Artificial Sequence: Synthetic amino acid sequence
  MOD_RES (2)..(7): Variable amino acid
  MOD_RES (9)..(14): Variable amino acid
  MOD_RES (17)..(20): Variable amino acid
  MOD_RES (22)..(30): Variable amino acid
CXXXXXXCXXXXXXCCXXXXCXXXXXXXXXC

SEQ ID NO: 190 - protein, 78 aa, Artificial Sequence
  Description of Artificial Sequence: Synthetic amino acid sequence
  MOD_RES (2)..(2): Variable amino acid
  MOD_RES (4)..(4): Variable amino acid
  MOD_RES (10)..(10): Variable amino acid
  MOD_RES (14)..(14): Variable amino acid
  MOD_RES (17)..(17): Variable amino acid
  MOD_RES (21)..(21): Variable amino acid
  MOD_RES (23)..(24): Variable amino acid
  MOD_RES (26)..(27): Variable amino acid
  MOD_RES (29)..(29): Variable amino acid
  MOD_RES (31)..(32): Variable amino acid
  MOD_RES (34)..(40): Variable amino acid
  MOD_RES (42)..(45): Variable amino acid
  MOD_RES (47)..(47): Variable amino acid
  MOD_RES (51)..(51): Variable amino acid
  MOD_RES (53)..(55): Variable amino acid
  MOD_RES (57)..(57): Variable amino acid
  MOD_RES (60)..(60): Variable amino acid
  MOD_RES (66)..(67): Variable amino acid
  MOD_RES (71)..(72): Variable amino acid
  MOD_RES (74)..(75): Variable amino acid
CXGXCSPFEXPPCXSSXCRCXPXXLXXGXCXXPXXXXXXXKXXXXHXNLCXSXXXCXKKXSGCFCXXYPNXXIXXGWC

SEQ ID NO: 191 - protein, 78 aa, Artificial Sequence
  Description of Artificial Sequence: Synthetic amino acid sequence
  MOD_RES (2)..(2): Variable amino acid
  MOD_RES (4)..(4): Variable amino acid
  MOD_RES (6)..(6): Variable amino acid
  MOD_RES (10)..(10): Variable amino acid
  MOD_RES (14)..(17): Variable amino acid
  MOD_RES (19)..(19): Variable amino acid
  MOD_RES (21)..(21): Variable amino acid
  MOD_RES (23)..(27): Variable amino acid
  MOD_RES (29)..(29): Variable amino acid
  MOD_RES (31)..(32): Variable amino acid
  MOD_RES (34)..(45): Variable amino acid
  MOD_RES (47)..(49): Variable amino acid
  MOD_RES (51)..(55): Variable amino acid
  MOD_RES (57)..(61): Variable amino acid
  MOD_RES (63)..(63): Variable amino acid
  MOD_RES (66)..(67): Variable amino acid
  MOD_RES (71)..(75): Variable amino acid
CXGXCXPFEXPPCXXXXCXCXPXXXXXGXCXXPXXXXXXXXXXXXHXXXCXXXXXCXXXXXGXFCXXYPNXXXXXGWC

SEQ ID NO: 192 - protein, 78 aa, Artificial Sequence
  Description of Artificial Sequence: Synthetic amino acid sequence
  MOD_RES (2)..(4): Variable amino acid
  MOD_RES (6)..(12): Variable amino acid
  MOD_RES (14)..(17): Variable amino acid
  MOD_RES (19)..(19): Variable amino acid
  MOD_RES (21)..(29): Variable amino acid
  MOD_RES (31)..(49): Variable amino acid
  MOD_RES (51)..(55): Variable amino acid
  MOD_RES (57)..(64): Variable amino acid
  MOD_RES (66)..(75): Variable amino acid
  MOD_RES (77)..(77): Variable amino acid
CXXXCXXXXXXXCXXXXCXCXXXXXXXXXCXXXXXXXXXXXXXXXXXXXCXXXXXCXXXXXXXXCXXXXXXXXXXGXC

SEQ ID NO: 193 - protein, 24 aa, Artificial Sequence
  Description of Artificial Sequence: Synthetic amino acid sequence
  MOD_RES (5)..(6): Variable amino acid
  MOD_RES (8)..(8): Variable amino acid
  MOD_RES (10)..(11): Variable amino acid
  MOD_RES (18)..(22): Variable amino acid
CCPCXXCXYXXGCPWGQXXXXXGC

SEQ ID NO: 194 - protein, 24 aa, Artificial Sequence
  Description of Artificial Sequence: Synthetic amino acid sequence
  MOD_RES (5)..(6): Variable amino acid
  MOD_RES (8)..(8): Variable amino acid
  MOD_RES (10)..(11): Variable amino acid
  MOD_RES (17)..(23): Variable amino acid
CCPCXXCXYXXGCPWGXXXXXXXC

SEQ ID NO: 195 - protein, 24 aa, Artificial Sequence
  Description of Artificial Sequence: Synthetic amino acid sequence
  MOD_RES (3)..(3): Variable amino acid
  MOD_RES (5)..(6): Variable amino acid
  MOD_RES (8)..(12): Variable amino acid
  MOD_RES (14)..(23): Variable amino acid
CCXCXXCXXXXXCXXXXXXXXXXC

SEQ ID NO: 196 - protein, 47 aa, Artificial Sequence
  Description of Artificial Sequence: Synthetic amino acid sequence
  MOD_RES (2)..(2): Variable amino acid
  MOD_RES (4)..(5): Variable amino acid
  MOD_RES (7)..(7): Variable amino acid
  MOD_RES (9)..(17): Variable amino acid
  MOD_RES (19)..(19): Variable amino acid
  MOD_RES (22)..(22): Variable amino acid
  MOD_RES (24)..(25): Variable amino acid
  MOD_RES (27)..(33): Variable amino acid
  MOD_RES (36)..(37): Variable amino acid
  MOD_RES (39)..(43): Variable amino acid
  MOD_RES (45)..(46): Variable amino acid
CXGXXGXRXXXXXXXXXCXDCXNXXRXXXXXXXCRXXCXXXXXFXXC

SEQ ID NO: 197 - protein, 47 aa, Artificial Sequence
  Description of Artificial Sequence: Synthetic amino acid sequence
  MOD_RES (2)..(7): Variable amino acid
  MOD_RES (9)..(17): Variable amino acid
  MOD_RES (19)..(19): Variable amino acid
  MOD_RES (22)..(22): Variable amino acid
  MOD_RES (24)..(25): Variable amino acid
  MOD_RES (27)..(33): Variable amino acid
  MOD_RES (35)..(37): Variable amino acid
  MOD_RES (39)..(43): Variable amino acid
  MOD_RES (45)..(46): Variable amino acid
CXXXXXXRXXXXXXXXXCXDCXNXXRXXXXXXXCXXXCXXXXXFXXC

SEQ ID NO: 198 - protein, 47 aa, Artificial Sequence
  Description of Artificial Sequence: Synthetic amino acid sequence
  MOD_RES (2)..(17): Variable amino acid
  MOD_RES (19)..(20): Variable amino acid
  MOD_RES (22)..(33): Variable amino acid
  MOD_RES (35)..(37): Variable amino acid
  MOD_RES (39)..(46): Variable amino acid
CXXXXXXXXXXXXXXXXCXXCXXXXXXXXXXXXCXXXCXXXXXXXXC

SEQ ID NO: 199 - protein, 47 aa, Artificial Sequence
  Description of Artificial Sequence: Synthetic amino acid sequence
  MOD_RES (2)..(2): Variable amino acid
  MOD_RES (4)..(7): Variable amino acid
  MOD_RES (9)..(10): Variable amino acid
  MOD_RES (12)..(16): Variable amino acid
  MOD_RES (18)..(19): Variable amino acid
  MOD_RES (20)..(20): Variable amino acid that may or may not be present
  MOD_RES (21)..(25): Variable amino acid
  MOD_RES (27)..(27): Variable amino acid that may or may not be present
  MOD_RES (28)..(32): Variable amino acid
  MOD_RES (34)..(35): Variable amino acid
  MOD_RES (37)..(45): Variable amino acid
CXCXXXXPXXRXXXXXGXXXXXXXXCXXXXXXWXXCXXXXXXXXXCC

SEQ ID NO: 200 - protein, 47 aa, Artificial Sequence
  Description of Artificial Sequence: Synthetic amino acid sequence
  MOD_RES (2)..(2): Variable amino acid
  MOD_RES (4)..(7): Variable amino acid
  MOD_RES (9)..(16): Variable amino acid
  MOD_RES (18)..(19): Variable amino acid
  MOD_RES (20)..(20): Variable amino acid that may or may not be present
  MOD_RES (21)..(25): Variable amino acid
  MOD_RES (27)..(27): Variable amino acid that may or may not be present
  MOD_RES (28)..(32): Variable amino acid
  MOD_RES (34)..(35): Variable amino acid
  MOD_RES (37)..(45): Variable amino acid
CXCXXXXPXXXXXXXXGXXXXXXXXCXXXXXXWXXCXXXXXXXXXCC

SEQ ID NO: 201 - protein, 47 aa, Artificial Sequence
  Description of Artificial Sequence: Synthetic amino acid sequence
  MOD_RES (2)..(2): Variable amino acid
  MOD_RES (4)..(19): Variable amino acid
  MOD_RES (20)..(20): Variable amino acid that may or may not be present
  MOD_RES (21)..(25): Variable amino acid
  MOD_RES (27)..(27): Variable amino acid that may or may not be present
  MOD_RES (28)..(35): Variable amino acid
  MOD_RES (37)..(45): Variable amino acid
CXCXXXXXXXXXXXXXXXXXXXXXXCXXXXXXXXXCXXXXXXXXXCC

SEQ ID NO: 202 - protein, 36 aa, Artificial Sequence
  Description of Artificial Sequence: Synthetic amino acid sequence
  MOD_RES (2)..(3): Variable amino acid
  MOD_RES (6)..(6): Variable amino acid
  MOD_RES (10)..(10): Variable amino acid
  MOD_RES (12)..(12): Variable amino acid
  MOD_RES (14)..(15): Variable amino acid
  MOD_RES (17)..(17): Variable amino acid
  MOD_RES (19)..(20): Variable amino acid
  MOD_RES (23)..(23): Variable amino acid
  MOD_RES (26)..(26): Variable amino acid
  MOD_RES (28)..(29): Variable amino acid
  MOD_RES (32)..(33): Variable amino acid
  MOD_RES (35)..(35): Variable amino acid
CXXNCXQCKXMXGXXFXGXXCAXSCXKXXGKXXPXC

SEQ ID NO: 203 - protein, 36 aa, Artificial Sequence
  Description of Artificial Sequence: Synthetic amino acid sequence
  MOD_RES (2)..(4): Variable amino acid
  MOD_RES (6)..(7): Variable amino acid
  MOD_RES (9)..(20): Variable amino acid
  MOD_RES (22)..(24): Variable amino acid
  MOD_RES (26)..(29): Variable amino acid
  MOD_RES (31)..(33): Variable amino acid
  MOD_RES (35)..(35): Variable amino acid
CXXXCXXCXXXXXXXXXXXXCXXXCXXXXGXXXPXC

SEQ ID NO: 204 - protein, 36 aa, Artificial Sequence
  Description of Artificial Sequence: Synthetic amino acid sequence
  MOD_RES (2)..(4): Variable amino acid
  MOD_RES (6)..(7): Variable amino acid
  MOD_RES (9)..(20): Variable amino acid
  MOD_RES (22)..(24): Variable amino acid
  MOD_RES (26)..(35): Variable amino acid
CXXXCXXCXXXXXXXXXXXXCXXXCXXXXXXXXXXC

SEQ ID NO: 205 - protein, 41 aa, Artificial Sequence
  Description of Artificial Sequence: Synthetic amino acid sequence
  MOD_RES (2)..(4): Variable amino acid
  MOD_RES (6)..(7): Variable amino acid
  MOD_RES (9)..(19): Variable amino acid
  MOD_RES (21)..(23): Variable amino acid
  MOD_RES (25)..(25): Variable amino acid
  MOD_RES (29)..(37): Variable amino acid
  MOD_RES (39)..(40): Variable amino acid
CXXXCXXCXXXXXXXXXXXNXXXCXLECXXXXXXXXXWXXC

SEQ ID NO: 206 - protein, 41 aa, Artificial Sequence
  Description of Artificial Sequence: Synthetic amino acid sequence
  MOD_RES (2)..(4): Variable amino acid
  MOD_RES (6)..(7): Variable amino acid
  MOD_RES (9)..(23): Variable amino acid
  MOD_RES (25)..(27): Variable amino acid
  MOD_RES (29)..(37): Variable amino acid
  MOD_RES (39)..(40): Variable amino acid
CXXXCXXCXXXXXXXXXXXXXXXCXXXCXXXXXXXXXWXXC

SEQ ID NO: 207 - protein, 41 aa, Artificial Sequence
  Description of Artificial Sequence: Synthetic amino acid sequence
  MOD_RES (2)..(4): Variable amino acid
  MOD_RES (6)..(7): Variable amino acid
  MOD_RES (9)..(23): Variable amino acid
  MOD_RES (25)..(27): Variable amino acid
  MOD_RES (29)..(40): Variable amino acid
CXXXCXXCXXXXXXXXXXXXXXXCXXXCXXXXXXXXXXXXC

SEQ ID NO: 208 - protein, 38 aa, Artificial Sequence
  Description of Artificial Sequence: Synthetic amino acid sequence
  MOD_RES (3)..(7): Variable amino acid
  MOD_RES (9)..(9): Variable amino acid
  MOD_RES (13)..(16): Variable amino acid
  MOD_RES (18)..(19): Variable amino acid
  MOD_RES (21)..(22): Variable amino acid
  MOD_RES (24)..(26): Variable amino acid
  MOD_RES (34)..(35): Variable amino acid
  MOD_RES (37)..(37): Variable amino acid
CDXXXXXSXCQMXXXXCXXAXXCXXXIEECKTSXXEXC

SEQ ID NO: 209 - protein, 38 aa, Artificial Sequence
  Description of Artificial Sequence: Synthetic amino acid sequence
  MOD_RES (2)..(9): Variable amino acid
  MOD_RES (11)..(16): Variable amino acid
  MOD_RES (18)..(22): Variable amino acid
  MOD_RES (24)..(29): Variable amino acid
  MOD_RES (31)..(37): Variable amino acid
CXXXXXXXXCXXXXXXCXXXXXCXXXXXXCXXXXXXXC

SEQ ID NO: 210 - protein, 31 aa, Artificial Sequence
  Description of Artificial Sequence: Synthetic amino acid sequence
  MOD_RES (2)..(2): Variable amino acid
  MOD_RES (4)..(4): Variable amino acid
  MOD_RES (9)..(10): Variable amino acid
  MOD_RES (18)..(19): Variable amino acid
  MOD_RES (21)..(23): Variable amino acid
  MOD_RES (25)..(26): Variable amino acid
  MOD_RES (28)..(29): Variable amino acid
CXGXDRPCXXCCPCCPGXXCXXXEXXGXXYC

SEQ ID NO: 211 - protein, 31 aa, Artificial Sequence
  Description of Artificial Sequence: Synthetic amino acid sequence
  MOD_RES (2)..(2): Variable amino acid
  MOD_RES (4)..(6): Variable amino acid
  MOD_RES (9)..(10): Variable amino acid
  MOD_RES (18)..(19): Variable amino acid
  MOD_RES (21)..(30): Variable amino acid
CXGXXXPCXXCCPCCPGXXCXXXXXXXXXXC

SEQ ID NO: 212 - protein, 31 aa, Artificial Sequence
  Description of Artificial Sequence: Synthetic amino acid sequence
  MOD_RES (2)..(7): Variable amino acid
  MOD_RES (9)..(10): Variable amino acid
  MOD_RES (13)..(13): Variable amino acid
  MOD_RES (16)..(19): Variable amino acid
  MOD_RES (21)..(30): Variable amino acid
CXXXXXXCXXCCXCCXXXXCXXXXXXXXXXC

SEQ ID NO: 213 - protein, 33 aa, Artificial Sequence
  Description of Artificial Sequence: Synthetic amino acid sequence
  MOD_RES (2)..(7): Variable amino acid
  MOD_RES (10)..(15): Variable amino acid
  MOD_RES (17)..(21): Variable amino acid
  MOD_RES (23)..(28): Variable amino acid
  MOD_RES (30)..(32): Variable amino acid
CXXXXXXCCXXXXXXCXXXXXCXXXXXXCXXXC

SEQ ID NO: 214 - protein, 33 aa, Artificial Sequence
  Description of Artificial Sequence: Synthetic amino acid sequence
  MOD_RES (3)..(6): Variable amino acid
  MOD_RES (11)..(12): Variable amino acid
  MOD_RES (14)..(14): Variable amino acid
  MOD_RES (17)..(17): Variable amino acid
  MOD_RES (19)..(20): Variable amino acid
  MOD_RES (24)..(24): Variable amino acid
  MOD_RES (26)..(28): Variable amino acid
  MOD_RES (30)..(30): Variable amino acid
  MOD_RES (32)..(32): Variable amino acid
CGXXXXYCCSXXGXYCXWXXVCYXSXXXCXKXC

SEQ ID NO: 215 - protein, 33 aa, Artificial Sequence; identical to SEQ ID NO: 213
  Description of Artificial Sequence: Synthetic amino acid sequence
  MOD_RES (2)..(7): Variable amino acid
  MOD_RES (10)..(15): Variable amino acid
  MOD_RES (17)..(21): Variable amino acid
  MOD_RES (23)..(28): Variable amino acid
  MOD_RES (30)..(32): Variable amino acid

SEQ ID NO: 216 - protein, 61 aa, Artificial Sequence
  Description of Artificial Sequence: Synthetic amino acid sequence
  MOD_RES (2)..(6): Variable amino acid
  MOD_RES (8)..(9): Variable amino acid
  MOD_RES (11)..(16): Variable amino acid
  MOD_RES (17)..(17): Variable amino acid that may or may not be present
  MOD_RES (18)..(18): Variable amino acid
  MOD_RES (20)..(20): Variable amino acid
  MOD_RES (23)..(24): Variable amino acid
  MOD_RES (25)..(25): Variable amino acid that may or may not be present
  MOD_RES (26)..(28): Variable amino acid
  MOD_RES (30)..(33): Variable amino acid
  MOD_RES (34)..(39): Variable amino acid that may or may not be present
  MOD_RES (40)..(40): Variable amino acid
  MOD_RES (42)..(45): Variable amino acid
  MOD_RES (46)..(54): Variable amino acid that may or may not be present
  MOD_RES (55)..(60): Variable amino acid
CXXXXXCXXCXXXXXXXXCXWCXXXXXXCXXXXXXXXXXXCXXXXXXXXXXXXXXXXXXXC

SEQ ID NO: 217 - protein, 61 aa, Artificial Sequence
  Description of Artificial Sequence: Synthetic amino acid sequence
  MOD_RES (2)..(6): Variable amino acid
  MOD_RES (8)..(9): Variable amino acid
  MOD_RES (11)..(16): Variable amino acid
  MOD_RES (17)..(17): Variable amino acid that may or may not be present
  MOD_RES (18)..(18): Variable amino acid
  MOD_RES (20)..(21): Variable amino acid
  MOD_RES (23)..(24): Variable amino acid
  MOD_RES (25)..(25): Variable amino acid that may or may not be present
  MOD_RES (26)..(28): Variable amino acid
  MOD_RES (30)..(33): Variable amino acid
  MOD_RES (34)..(39): Variable amino acid that may or may not be present
  MOD_RES (40)..(40): Variable amino acid
  MOD_RES (42)..(45): Variable amino acid
  MOD_RES (46)..(54): Variable amino acid that may or may not be present
  MOD_RES (55)..(60): Variable amino acid
CXXXXXCXXCXXXXXXXXCXXCXXXXXXCXXXXXXXXXXXCXXXXXXXXXXXXXXXXXXXC

SEQ ID NO: 218 - protein, 39 aa, Artificial Sequence
  Description of Artificial Sequence: Synthetic amino acid sequence
  MOD_RES (2)..(8): Variable amino acid
  MOD_RES (10)..(11): Variable amino acid
  MOD_RES (14)..(16): Variable amino acid
  MOD_RES (19)..(21): Variable amino acid
  MOD_RES (23)..(25): Variable amino acid
  MOD_RES (31)..(37): Variable amino acid
CXXXXXXXRXXCGXXXITXXXCXXXGCCFDXXXXXXXWC

SEQ ID NO: 219 - protein, 39 aa, Artificial Sequence
  Description of Artificial Sequence: Synthetic amino acid sequence
  MOD_RES (2)..(8): Variable amino acid
  MOD_RES (10)..(11): Variable amino acid
  MOD_RES (13)..(21): Variable amino acid
  MOD_RES (23)..(26): Variable amino acid
  MOD_RES (29)..(38): Variable amino acid
CXXXXXXXRXXCXXXXXXXXXCXXXXCCXXXXXXXXXXC

SEQ ID NO: 220 - protein, 39 aa, Artificial Sequence
  Description of Artificial Sequence: Synthetic amino acid sequence
  MOD_RES (2)..(11): Variable amino acid
  MOD_RES (13)..(21): Variable amino acid
  MOD_RES (23)..(26): Variable amino acid
  MOD_RES (29)..(38): Variable amino acid
CXXXXXXXXXXCXXXXXXXXXCXXXXCCXXXXXXXXXXC

SEQ ID NO: 221 - protein, 48 aa, Artificial Sequence
  Description of Artificial Sequence: Synthetic amino acid sequence
  MOD_RES (7)..(7): Variable amino acid
  MOD_RES (9)..(11): Variable amino acid
  MOD_RES (13)..(13): Variable amino acid
  MOD_RES (15)..(15): Variable amino acid
  MOD_RES (17)..(20): Variable amino acid
  MOD_RES (21)..(21): May or may not be present
  MOD_RES (22)..(23): Variable amino acid that may or may not be present
  MOD_RES (24)..(28): Variable amino acid
  MOD_RES (30)..(35): Variable amino acid
  MOD_RES (36)..(38): Variable amino acid that may or may not be present
  MOD_RES (39)..(41): Variable amino acid
  MOD_RES (43)..(43): Variable amino acid that may or may not be present
  MOD_RES (44)..(47): Variable amino acid
CSVTCGXGXXXRXRXCXXXXPXXXXXXXCXXXXXXXXXXXXCXXXXXC

SEQ ID NO: 222 - protein, 48 aa, Artificial Sequence
  Description of Artificial Sequence: Synthetic amino acid sequence
  MOD_RES (2)..(4): Variable amino acid
  MOD_RES (6)..(7): Variable amino acid
  MOD_RES (9)..(11): Variable amino acid
  MOD_RES (13)..(15): Variable amino acid
  MOD_RES (17)..(20): Variable amino acid
  MOD_RES (21)..(23): Variable amino acid that may or may not be present
  MOD_RES (24)..(28): Variable amino acid
  MOD_RES (30)..(35): Variable amino acid
  MOD_RES (36)..(38): Variable amino acid that may or may not be present
  MOD_RES (39)..(41): Variable amino acid
  MOD_RES (43)..(43): Variable amino acid that may or may not be present
  MOD_RES (44)..(47): Variable amino acid
CXXXCXXGXXXRXXXCXXXXXXXXXXXXCXXXXXXXXXXXXCXXXXXC

SEQ ID NO: 223 - protein, 48 aa, Artificial Sequence
  Description of Artificial Sequence: Synthetic amino acid sequence
  MOD_RES (2)..(4): Variable amino acid
  MOD_RES (6)..(15): Variable amino acid
  MOD_RES (17)..(20): Variable amino acid
  MOD_RES (21)..(23): Variable amino acid that may or may not be present
  MOD_RES (24)..(28): Variable amino acid
  MOD_RES (30)..(35): Variable amino acid
  MOD_RES (36)..(38): Variable amino acid that may or may not be present
  MOD_RES (39)..(41): Variable amino acid
  MOD_RES (43)..(43): Variable amino acid that may or may not be present
  MOD_RES (44)..(47): Variable amino acid
CXXXCXXXXXXXXXXCXXXXXXXXXXXXCXXXXXXXXXXXXCXXXXXC

SEQ ID NO: 224 - protein, 25 aa, Artificial Sequence
  Description of Artificial Sequence: Synthetic amino acid sequence
  MOD_RES (2)..(3): Variable amino acid
  MOD_RES (5)..(5): Variable amino acid
  MOD_RES (7)..(8): Variable amino acid
  MOD_RES (9)..(9): Variable amino acid that may or may not be present
  MOD_RES (11)..(11): Variable amino acid
  MOD_RES (14)..(14): Variable amino acid
  MOD_RES (16)..(16): Variable amino acid
  MOD_RES (18)..(18): Variable amino acid
  MOD_RES (20)..(23): Variable amino acid
  MOD_RES (24)..(24): Variable amino acid that may or may not be present
CXXCXCXXXSXPPXCXCXDXXXXXC

SEQ ID NO: 225 - protein, 25 aa, Artificial Sequence
  Description of Artificial Sequence: Synthetic amino acid sequence
  MOD_RES (2)..(3): Variable amino acid
  MOD_RES (5)..(5): Variable amino acid
  MOD_RES (7)..(8): Variable amino acid
  MOD_RES (9)..(9): Variable amino acid that may or may not be present
  MOD_RES (10)..(14): Variable amino acid
  MOD_RES (16)..(16): Variable amino acid
  MOD_RES (18)..(18): Variable amino acid
  MOD_RES (20)..(23): Variable amino acid
  MOD_RES (24)..(24): Variable amino acid that may or may not be present
CXXCXCXXXXXXXXCXCXDXXXXXC

SEQ ID NO: 226 - protein, 25 aa, Artificial Sequence
  Description of Artificial Sequence: Synthetic amino acid sequence
  MOD_RES (2)..(3): Variable amino acid
  MOD_RES (5)..(5): Variable amino acid
  MOD_RES (7)..(8): Variable amino acid
  MOD_RES (9)..(9): Variable amino acid that may or may not be present
  MOD_RES (10)..(14): Variable amino acid
  MOD_RES (16)..(16): Variable amino acid
  MOD_RES (18)..(23): Variable amino acid
  MOD_RES (24)..(24): Variable amino acid that may or may not be present
CXXCXCXXXXXXXXCXCXXXXXXXC

SEQ ID NO: 227 - protein, 77 aa, Artificial Sequence
  Description of Artificial Sequence: Synthetic amino acid sequence
  MOD_RES (2)..(3): Variable amino acid
  MOD_RES (7)..(9): Variable amino acid
  MOD_RES (11)..(11): Variable amino acid
  MOD_RES (13)..(13): Variable amino acid
  MOD_RES (16)..(16): Variable amino acid
  MOD_RES (21)..(23): Variable amino acid
  MOD_RES (26)..(27): Variable amino acid
  MOD_RES (29)..(34): Variable amino acid
  MOD_RES (36)..(37): Variable amino acid
  MOD_RES (39)..(43): Variable amino acid
  MOD_RES (46)..(51): Variable amino acid
  MOD_RES (53)..(56): Variable amino acid
  MOD_RES (58)..(58): Variable amino acid
  MOD_RES (60)..(62): Variable amino acid
  MOD_RES (64)..(64): Variable amino acid
  MOD_RES (67)..(70): Variable amino acid
  MOD_RES (72)..(73): Variable amino acid
  MOD_RES (75)..(76): Variable amino acid
CXXCGPXXXGXCXGPXICCGXXXGCXXGXXXXXXCXXEXXXXXPCXXXXXXCXXXXGXCXXXGXCCXXXXCXXDXXC

SEQ ID NO: 228 - protein, 77 aa, Artificial Sequence
  Description of Artificial Sequence: Synthetic amino acid sequence
  MOD_RES (2)..(3): Variable amino acid
  MOD_RES (7)..(9): Variable amino acid
  MOD_RES (11)..(11): Variable amino acid
  MOD_RES (13)..(13): Variable amino acid
  MOD_RES (16)..(17): Variable amino acid
  MOD_RES (21)..(23): Variable amino acid
  MOD_RES (26)..(27): Variable amino acid
  MOD_RES (29)..(34): Variable amino acid
  MOD_RES (36)..(43): Variable amino acid
  MOD_RES (46)..(51): Variable amino acid
  MOD_RES (53)..(56): Variable amino acid
  MOD_RES (58)..(58): Variable amino acid
  MOD_RES (60)..(62): Variable amino acid
  MOD_RES (64)..(64): Variable amino acid
  MOD_RES (67)..(70): Variable amino acid
  MOD_RES (72)..(76): Variable amino acid
CXXCGPXXXGXCXGPXXCCGXXXGCXXGXXXXXXCXXXXXXXXPCXXXXXXCXXXXGXCXXXGXCCXXXXCXXXXXC

SEQ ID NO: 229 - protein, 77 aa, Artificial Sequence
  Description of Artificial Sequence: Synthetic amino acid sequence
  MOD_RES (2)..(3): Variable amino acid
  MOD_RES (5)..(11): Variable amino acid
  MOD_RES (13)..(17): Variable amino acid
  MOD_RES (20)..(24): Variable amino acid
  MOD_RES (26)..(34): Variable amino acid
  MOD_RES (36)..(44): Variable amino acid
  MOD_RES (46)..(51): Variable amino acid
  MOD_RES (53)..(58): Variable amino acid
  MOD_RES (60)..(64): Variable amino acid
  MOD_RES (67)..(70): Variable amino acid
  MOD_RES (72)..(76): Variable amino acid
CXXCXXXXXXXCXXXXXCCXXXXXCXXXXXXXXXCXXXXXXXXXCXXXXXXCXXXXXXCXXXXXCCXXXXCXXXXXC

SEQ ID NO: 230 - protein, 72 aa, Artificial Sequence
  Description of Artificial Sequence: Synthetic amino acid sequence
  MOD_RES (5)..(8): Variable amino acid
  MOD_RES (10)..(11): Variable amino acid that may or may not be present
  MOD_RES (12)..(14): Variable amino acid
  MOD_RES (17)..(17): Variable amino acid that may or may not be present
  MOD_RES (18)..(21): Variable amino acid
  MOD_RES (23)..(23): Variable amino acid
  MOD_RES (25)..(29): Variable amino acid
  MOD_RES (31)..(31): Variable amino acid
  MOD_RES (32)..(33): Variable amino acid that may or may not be present
  MOD_RES (34)..(34): Variable amino acid
  MOD_RES (36)..(36): Variable amino acid
  MOD_RES (39)..(39): Variable amino acid
  MOD_RES (40)..(40): Variable amino acid that may or may not be present
  MOD_RES (41)..(41): Variable amino acid
  MOD_RES (43)..(50): Variable amino acid
  MOD_RES (53)..(56): Variable amino acid
  MOD_RES (57)..(57): Variable amino acid that may or may not be present
  MOD_RES (58)..(58): Variable amino acid
  MOD_RES (60)..(64): Variable amino acid
  MOD_RES (66)..(66): Variable amino acid
  MOD_RES (68)..(71): Variable amino acid
CDCGXXXXCXXXXXCCXXXXXCXLXXXXXCXXXXGXCCXXXCXXXXXXXXCRXXXXXXCXXXXXCXGXXXXC

SEQ ID NO: 231 - protein, 72 aa, Artificial Sequence
  Description of Artificial Sequence: Synthetic amino acid sequence
  MOD_RES (5)..(8): Variable amino acid
  MOD_RES (10)..(11): Variable amino acid that may or may not be present
  MOD_RES (12)..(14): Variable amino acid
  MOD_RES (17)..(17): Variable amino acid that may or may not be present
  MOD_RES (18)..(21): Variable amino acid
  MOD_RES (23)..(29): Variable amino acid
  MOD_RES (31)..(31): Variable amino acid
  MOD_RES (32)..(33): Variable amino acid that may or may not be present
  MOD_RES (34)..(36): Variable amino acid
  MOD_RES (39)..(39): Variable amino acid
  MOD_RES (40)..(40): Variable amino acid that may or may not be present
  MOD_RES (41)..(41): Variable amino acid
  MOD_RES (43)..(50): Variable amino acid
  MOD_RES (52)..(56): Variable amino acid
  MOD_RES (57)..(57): Variable amino acid that may or may not be present
  MOD_RES (58)..(58): Variable amino acid
  MOD_RES (60)..(64): Variable amino acid
  MOD_RES (66)..(66): Variable amino acid
  MOD_RES (68)..(71): Variable amino acid
CDCGXXXXCXXXXXCCXXXXXCXXXXXXXCXXXXXXCCXXXCXXXXXXXXCXXXXXXXCXXXXXCXGXXXXC

SEQ ID NO: 232 - protein, 72 aa, Artificial Sequence
  Description of Artificial Sequence: Synthetic amino acid sequence
  MOD_RES (2)..(2): Variable amino acid
  MOD_RES (4)..(8): Variable amino acid
  MOD_RES (10)..(11): Variable amino acid that may or may not be present
  MOD_RES (12)..(14): Variable amino acid
  MOD_RES (17)..(17): Variable amino acid that may or may not be present
  MOD_RES (18)..(21): Variable amino acid
  MOD_RES (23)..(29): Variable amino acid
  MOD_RES (31)..(31): Variable amino acid
  MOD_RES (32)..(33): Variable amino acid that may or may not be present
  MOD_RES (34)..(36): Variable amino acid
  MOD_RES (39)..(39): Variable amino acid
  MOD_RES (40)..(40): Variable amino acid that may or may not be present
  MOD_RES (41)..(41): Variable amino acid
  MOD_RES (43)..(50): Variable amino acid
  MOD_RES (52)..(56): Variable amino acid
  MOD_RES (57)..(57): Variable amino acid that may or may not be present
  MOD_RES (58)..(58): Variable amino acid
  MOD_RES (60)..(64): Variable amino acid
  MOD_RES (66)..(71): Variable amino acid
CXCXXXXXCXXXXXCCXXXXXCXXXXXXXCXXXXXXCCXXXCXXXXXXXXCXXXXXXXCXXXXXCXXXXXXC

SEQ ID NO: 233 - protein, 40 aa, Artificial Sequence
  Description of Artificial Sequence: Synthetic amino acid sequence
  MOD_RES (3)..(6): Variable amino acid
  MOD_RES (8)..(10): Variable amino acid
  MOD_RES (14)..(18): Variable amino acid
  MOD_RES (21)..(21): Variable amino acid
  MOD_RES (23)..(24): Variable amino acid
  MOD_RES (29)..(29): Variable amino acid
  MOD_RES (31)..(32): Variable amino acid
  MOD_RES (34)..(39): Variable amino acid
CCXXXXGXXXCCPXXXXXCCXDXXHCCPXGXXCXXXXXXC

SEQ ID NO: 234 - protein, 40 aa, Artificial Sequence
  Description of Artificial Sequence: Synthetic amino acid sequence
  MOD_RES (3)..(10): Variable amino acid
  MOD_RES (14)..(18): Variable amino acid
  MOD_RES (21)..(21): Variable amino acid
  MOD_RES (23)..(24): Variable amino acid
  MOD_RES (29)..(32): Variable amino acid
  MOD_RES (34)..(39): Variable amino acid
CCXXXXXXXXCCPXXXXXCCXDXXHCCPXXXXCXXXXXXC

SEQ ID NO: 235 - protein, 40 aa, Artificial Sequence
  Description of Artificial Sequence: Synthetic amino acid sequence
  MOD_RES (3)..(10): Variable amino acid
  MOD_RES (13)..(18): Variable amino acid
  MOD_RES (21)..(25): Variable amino acid
  MOD_RES (28)..(32): Variable amino acid
  MOD_RES (34)..(39): Variable amino acid
CCXXXXXXXXCCXXXXXXCCXXXXXCCXXXXXCXXXXXXC

SEQ ID NO: 236 - protein, 120 aa, Artificial Sequence
  Description of Artificial Sequence: Synthetic amino acid sequence
  MOD_RES (4)..(7): Variable amino acid
  MOD_RES (9)..(10): Variable amino acid
  MOD_RES (12)..(12): Variable amino acid
  MOD_RES (16)..(19): Variable amino acid
  MOD_RES (21)..(22): Variable amino acid
  MOD_RES (24)..(24): Variable amino acid
  MOD_RES (28)..(31): Variable amino acid
  MOD_RES (33)..(34): Variable amino acid
  MOD_RES (36)..(36): Variable amino acid
  MOD_RES (40)..(43): Variable amino acid
  MOD_RES (45)..(46): Variable amino acid
  MOD_RES (48)..(48): Variable amino acid
  MOD_RES (52)..(55): Variable amino acid
  MOD_RES (57)..(58): Variable amino acid
  MOD_RES (60)..(60): Variable amino acid
  MOD_RES (64)..(67): Variable amino acid
  MOD_RES (69)..(70): Variable amino acid
  MOD_RES (72)..(72): Variable amino acid
  MOD_RES (76)..(79): Variable amino acid
  MOD_RES (81)..(82): Variable amino acid
  MOD_RES (84)..(84): Variable amino acid
  MOD_RES (88)..(91): Variable amino acid
  MOD_RES (93)..(94): Variable amino acid
  MOD_RES (96)..(96): Variable amino acid
  MOD_RES (100)..(103): Variable amino acid
  MOD_RES (105)..(106): Variable amino acid
  MOD_RES (108)..(108): Variable amino acid
  MOD_RES (112)..(115): Variable amino acid
  MOD_RES (117)..(118): Variable amino acid
  MOD_RES (120)..(120): Variable amino acid
  This sequence may encompass 1 to 10 "Thr-Cys-Thr-Xaa-Xaa- Xaa-Xaa-Cys-Xaa-Xaa-Ala-Xaa" repeating units
TCTXXXXCXXAXTCTXXXXCXXAXTCTXXXXCXXAXTCTXXXXCXXAXTCTXXXXCXXAXTCTXXXXCXXAXTCTXXXXCXXAXTCTXXXXCXXAXTCTXXXXCXXAXTCTXXXXCXXAX

SEQ ID NO: 237 - protein, 120 aa, Artificial Sequence
  Description of Artificial Sequence: Synthetic amino acid sequence
  MOD_RES (1)..(1): Variable amino acid
  MOD_RES (3)..(7): Variable amino acid
  MOD_RES (9)..(13): Variable amino acid
  MOD_RES (15)..(19): Variable amino acid
  MOD_RES (21)..(25): Variable amino acid
  MOD_RES (27)..(31): Variable amino acid
  MOD_RES (33)..(37): Variable amino acid
  MOD_RES (39)..(43): Variable amino acid
  MOD_RES (45)..(49): Variable amino acid
  MOD_RES (51)..(55): Variable amino acid
  MOD_RES (57)..(61): Variable amino acid
  MOD_RES (63)..(67): Variable amino acid
  MOD_RES (69)..(73): Variable amino acid
  MOD_RES (75)..(79): Variable amino acid
  MOD_RES (81)..(85): Variable amino acid
  MOD_RES (87)..(91): Variable amino acid
  MOD_RES (93)..(97): Variable amino acid
  MOD_RES (99)..(103): Variable amino acid
  MOD_RES (105)..(109): Variable amino acid
  MOD_RES (111)..(115): Variable amino acid
  MOD_RES (117)..(120): Variable amino acid
  This sequence may encompass 1 to 10 "Xaa-Cys-Xaa-Xaa-Xaa- Xaa-Xaa-Cys-Xaa-Xaa-Xaa-Xaa" repeating units
XCXXXXXCXXXXXCXXXXXCXXXXXCXXXXXCXXXXXCXXXXXCXXXXXCXXXXXCXXXXXCXXXXXCXXXXXCXXXXXCXXXXXCXXXXXCXXXXXCXXXXXCXXXXXCXXXXXCXXXX

SEQ ID NO: 238 - protein, 100 aa, Artificial Sequence
  Description of Artificial Sequence: Synthetic amino acid sequence
  MOD_RES (2)..(3): Variable amino acid
  MOD_RES (4)..(4): Variable amino acid that may or may not be present
  MOD_RES (6)..(7): Variable amino acid
  MOD_RES (8)..(11): Variable amino acid that may or may not be present
  MOD_RES (12)..(15): Variable amino acid
  MOD_RES (17)..(20): Variable amino acid
  MOD_RES (21)..(24): Variable amino acid that may or may not be present
  MOD_RES (25)..(27): Variable amino acid
  MOD_RES (31)..(36): Variable amino acid
  MOD_RES (39)..(44): Variable amino acid
  MOD_RES (46)..(48): Variable amino acid
  MOD_RES (50)..(51): Variable amino acid
  MOD_RES (52)..(52): Variable amino acid that may or may not be present
  MOD_RES (53)..(54): Variable amino acid
  MOD_RES (56)..(62): Variable amino acid
  MOD_RES (66)..(67): Variable amino acid
  MOD_RES (69)..(69): Variable amino acid
  MOD_RES (73)..(73): Variable amino acid
  MOD_RES (74)..(75): Variable amino acid that may or may not be present
  MOD_RES (76)..(76): Variable amino acid
  MOD_RES (78)..(79): Variable amino acid
  MOD_RES (80)..(80): Variable amino acid that may or may not be present
  MOD_RES (81)..(82): Variable amino acid
  MOD_RES (84)..(84): Variable amino acid
  MOD_RES (87)..(88): Variable amino acid
  MOD_RES (90)..(92): Variable amino acid
  MOD_RES (94)..(94): Variable amino acid
  MOD_RES (96)..(98): Variable amino acid
CXXXCXXXXXXXXXXCXXXXXXXXXXXRCWXXXXXXCQXXXXXXCXXXCXXXXXCXXXXXXXCCHXXCXGGCXXXXPXXXXXCXACXXFXXXGXCXXXCP

SEQ ID NO: 239 - protein, 100 aa, Artificial Sequence
  Description of Artificial Sequence: Synthetic amino acid sequence
  MOD_RES (2)..(3): Variable amino acid
  MOD_RES (4)..(4): Variable amino acid that may or may not be present
  MOD_RES (6)..(7): Variable amino acid
  MOD_RES (8)..(11): Variable amino acid that may or may not be present
  MOD_RES (12)..(15): Variable amino acid
  MOD_RES (17)..(20): Variable amino acid
  MOD_RES (21)..(24): Variable amino acid that may or may not be present
  MOD_RES (25)..(27): Variable amino acid
  MOD_RES (31)..(36): Variable amino acid
  MOD_RES (39)..(44): Variable amino acid
  MOD_RES (46)..(48): Variable amino acid
  MOD_RES (50)..(51): Variable amino acid
  MOD_RES (52)..(52): Variable amino acid that may or may not be present
  MOD_RES (53)..(54): Variable amino acid
  MOD_RES (56)..(62): Variable amino acid
  MOD_RES (65)..(67): Variable amino acid
  MOD_RES (69)..(69): Variable amino acid
  MOD_RES (71)..(71): Variable amino acid
  MOD_RES (73)..(73): Variable amino acid
  MOD_RES (74)..(75): Variable amino acid that may or may not be present
  MOD_RES (76)..(76): Variable amino acid
  MOD_RES (78)..(79): Variable amino acid
  MOD_RES (80)..(80): Variable amino acid that may or may not be present
  MOD_RES (81)..(82): Variable amino acid
  MOD_RES (84)..(85): Variable amino acid
  MOD_RES (87)..(94): Variable amino acid
  MOD_RES (96)..(98): Variable amino acid
CXXXCXXXXXXXXXXCXXXXXXXXXXXRCWXXXXXXCQXXXXXXCXXXCXXXXXCXXXXXXXCCXXXCXGXCXXXXPXXXXXCXXCXXXXXXXXCXXXCP

SEQ ID NO: 240 - protein, 99 aa, Artificial Sequence
  Description of Artificial Sequence: Synthetic amino acid sequence
  MOD_RES (2)..(3): Variable amino acid
  MOD_RES (4)..(4): Variable amino acid that may or may not be present
  MOD_RES (6)..(9): Variable amino acid
  MOD_RES (8)..(11): Variable amino acid that may or may not be present
  MOD_RES (12)..(15): Variable amino acid
  MOD_RES (17)..(20): Variable amino acid
  MOD_RES (21)..(24): Variable amino acid that may or may not be present
  MOD_RES (25)..(28): Variable amino acid
  MOD_RES (30)..(36): Variable amino acid
  MOD_RES (38)..(44): Variable amino acid
  MOD_RES (46)..(48): Variable amino acid
  MOD_RES (50)..(51): Variable amino acid
  MOD_RES (52)..(52): Variable amino acid that may or may not be present
  MOD_RES (53)..(54): Variable amino acid
  MOD_RES (56)..(62): Variable amino acid
  MOD_RES (65)..(67): Variable amino acid
  MOD_RES (69)..(71): Variable amino acid
  MOD_RES (73)..(73): Variable amino acid
  MOD_RES (74)..(75): Variable amino acid that may or may not be present
  MOD_RES (76)..(79): Variable amino acid
  MOD_RES (80)..(80): Variable amino acid that may or may not be present
  MOD_RES (81)..(82): Variable amino acid
  MOD_RES (84)..(85): Variable amino acid
  MOD_RES (87)..(94): Variable amino acid
  MOD_RES (96)..(98): Variable amino acid
CXXXCXXXXXXXXXXCXXXXXXXXXXXXCXXXXXXXCXXXXXXXCXXXCXXXXXCXXXXXXXCCXXXCXXXCXXXXXXXXXXCXXCXXXXXXXXCXXXC

SEQ ID NO: 241 - protein, 14 aa, Artificial Sequence
  Description of Artificial Sequence: Synthetic amino acid sequence
  MOD_RES (1)..(3): Variable amino acid
  MOD_RES (4)..(4): Trp, Tyr, Phe or Leu
  MOD_RES (5)..(8): Variable amino acid
  MOD_RES (10)..(10): Variable amino acid
  MOD_RES (12)..(12): Variable amino acid
  MOD_RES (14)..(14): Variable amino acid
XXXXXXXXCXCXCX

SEQ ID NO: 242 - protein, 14 aa, Artificial Sequence
  Description of Artificial Sequence: Synthetic amino acid sequence
  MOD_RES (1)..(8): Variable amino acid
  MOD_RES (10)..(10): Variable amino acid
  MOD_RES (12)..(12): Variable amino acid
  MOD_RES (14)..(14): Variable amino acid
XXXXXXXXCXCXCX

SEQ ID NO: 243 - protein, 154 aa, Artificial Sequence
  Description of Artificial Sequence: Synthetic amino acid sequence
  MOD_RES (2)..(2): Variable amino acid
  MOD_RES (4)..(8): Variable amino acid
  MOD_RES (10)..(16): Variable amino acid
  MOD_RES (17)..(18): Variable amino acid that may or may not be present
  MOD_RES (19)..(23): Variable amino acid
  MOD_RES (25)..(26): Variable amino acid
  MOD_RES (27)..(27): Variable amino acid that may or may not be present
  MOD_RES (28)..(31): Variable amino acid
  MOD_RES (33)..(38): Variable amino acid
  MOD_RES (39)..(39): Variable amino acid that may or may not be present
  MOD_RES (40)..(43): Variable amino acid
  MOD_RES (47)..(57): Variable amino acid
  MOD_RES (59)..(59): Variable amino acid
  MOD_RES (60)..(60): Variable amino acid that may or may not be present
  MOD_RES (61)..(64): Variable amino acid
  MOD_RES (66)..(67): Variable amino acid
  MOD_RES (69)..(71): Variable amino acid
  MOD_RES (72)..(72): Variable amino acid that may or may not be present
  MOD_RES (73)..(73): Variable amino acid
  MOD_RES (76)..(80): Variable amino acid
  MOD_RES (82)..(86): Variable amino acid
  MOD_RES (88)..(88): Variable amino acid
  MOD_RES (91)..(91): Variable amino acid
  MOD_RES (93)..(97): Variable amino acid
  MOD_RES (98)..(98): Cys or variable amino acid
  MOD_RES (99)..(104): Variable amino acid
  MOD_RES (106)..(109): Variable amino acid
  MOD_RES (111)..(114): Variable amino acid
  MOD_RES (115)..(115): Variable amino acid that may or may not be present
  MOD_RES (116)..(119): Variable amino acid
  MOD_RES (122)..(126): Variable amino acid
  MOD_RES (127)..(129): Variable amino acid that may or may not be present
  MOD_RES (130)..(133): Variable amino acid
  MOD_RES (137)..(145): Variable amino acid
  MOD_RES (146)..(146): Cys or variable amino acid
  MOD_RES (147)..(147): Variable amino acid
  MOD_RES (149)..(150): Variable amino acid
  MOD_RES (152)..(153): Variable amino acid
CXSXXXXXCXXXXXXXXXXXXXXCXXXXXXXCXXXXXXXXXXXRGCXXXXXXXXXXXCXXXXXXCXXCXXXXXCNXXXXXPXXXXXCXQCXGXXXXXXXXXXXXLXXXXCXXXXXXXXXCYXXXXXXXXXXXXRGCXXXXXXXXXXXDXXCXXC

SEQ ID NO: 244 - protein, 154 aa, Artificial Sequence
  Description of Artificial Sequence: Synthetic amino acid sequence
  MOD_RES (2)..(8): Variable amino acid
  MOD_RES (10)..(16): Variable amino acid
  MOD_RES (17)..(18): Variable amino acid that may or may not be present
  MOD_RES (19)..(23): Variable amino acid
  MOD_RES (25)..(26): Variable amino acid
  MOD_RES (27)..(27): Variable amino acid that may or may not be present
  MOD_RES (28)..(31): Variable amino acid
  MOD_RES (33)..(38): Variable amino acid
  MOD_RES (39)..(39): Variable amino acid that may or may not be present
  MOD_RES (40)..(44): Variable amino acid
  MOD_RES (47)..(57): Variable amino acid
  MOD_RES (59)..(59): Variable amino acid
  MOD_RES (60)..(60): Variable amino acid that may or may not be present
  MOD_RES (61)..(64): Variable amino acid
  MOD_RES (66)..(67): Variable amino acid
  MOD_RES (69)..(71): Variable amino acid
  MOD_RES (72)..(72): Variable amino acid that may or may not be present
  MOD_RES (73)..(73): Variable amino acid
  MOD_RES (76)..(86): Variable amino acid
  MOD_RES (88)..(89): Variable amino acid
  MOD_RES (91)..(97): Variable amino acid
  MOD_RES (98)..(98): Cys or variable amino acid
  MOD_RES (99)..(109): Variable amino acid
  MOD_RES (111)..(114): Variable amino acid
  MOD_RES (115)..(115): Variable amino acid that may or may not be present
  MOD_RES (116)..(119): Variable amino acid
  MOD_RES (121)..(126): Variable amino acid
  MOD_RES (127)..(129): Variable amino acid that may or may not be present
  MOD_RES (130)..(133): Variable amino acid
  MOD_RES (137)..(145): Variable amino acid
  MOD_RES (146)..(146): Cys or variable amino acid
  MOD_RES (147)..(150): Variable amino acid
  MOD_RES (152)..(153): Variable amino acid
CXXXXXXXCXXXXXXXXXXXXXXCXXXXXXXCXXXXXXXXXXXXGCXXXXXXXXXXXCXXXXXXCXXCXXXXXCNXXXXXXXXXXXCXXCXXXXXXXXXXXXXXXXXXXCXXXXXXXXXCXXXXXXXXXXXXXRGCXXXXXXXXXXXXXXCXXC

SEQ ID NO: 245 - protein, 154 aa, Artificial Sequence
  Description of Artificial Sequence: Synthetic amino acid sequence
  MOD_RES (2)..(8): Variable amino acid
  MOD_RES (10)..(16): Variable amino acid
  MOD_RES (17)..(18): Variable amino acid that may or may not be present
  MOD_RES (19)..(23): Variable amino acid
  MOD_RES (25)..(26): Variable amino acid
  MOD_RES (27)..(27): Variable amino acid that may or may not be present
  MOD_RES (28)..(31): Variable amino acid
  MOD_RES (33)..(38): Variable amino acid
  MOD_RES (39)..(39): Variable amino acid that may or may not be present
  MOD_RES (40)..(45): Variable amino acid
  MOD_RES (47)..(57): Variable amino acid
  MOD_RES (59)..(59): Variable amino acid
  MOD_RES (60)..(60): Variable amino acid that may or may not be present
  MOD_RES (61)..(64): Variable amino acid
  MOD_RES (66)..(67): Variable amino acid
  MOD_RES (69)..(71): Variable amino acid
  MOD_RES (72)..(72): Variable amino acid that may or may not be present
  MOD_RES (73)..(73): Variable amino acid
  MOD_RES (75)..(86): Variable amino acid
  MOD_RES (88)..(89): Variable amino acid
  MOD_RES (91)..(97): Variable amino acid
  MOD_RES (98)..(98): Cys or variable amino acid
  MOD_RES (99)..(109): Variable amino acid
  MOD_RES (111)..(114): Variable amino acid
  MOD_RES (115)..(115): Variable amino acid that may or may not be present
  MOD_RES (116)..(119): Variable amino acid
  MOD_RES (121)..(126): Variable amino acid
  MOD_RES (127)..(129): Variable amino acid that may or may not be present
  MOD_RES (130)..(135): Variable amino acid
  MOD_RES (137)..(145): Variable amino acid
  MOD_RES (146)..(146): Cys or variable amino acid
  MOD_RES (147)..(150): Variable amino acid
  MOD_RES (152)..(153): Variable amino acid
CXXXXXXXCXXXXXXXXXXXXXXCXXXXXXXCXXXXXXXXXXXXXCXXXXXXXXXXXCXXXXXXCXXCXXXXXCXXXXXXXXXXXXCXXCXXXXXXXXXXXXXXXXXXXCXXXXXXXXXCXXXXXXXXXXXXXXXCXXXXXXXXXXXXXXCXXC

SEQ ID NO: 246 - protein, 75 aa, Artificial Sequence
  Description of Artificial Sequence: Synthetic amino acid sequence
  MOD_RES (1)..(6): Variable amino acid
  MOD_RES (8)..(13): Variable amino acid
  MOD_RES (14)..(14): Variable amino acid that may or may not be present
  MOD_RES (17)..(19): Variable amino acid
  MOD_RES (20)..(21): Variable amino acid that may or may not be present
  MOD_RES (22)..(22): Variable amino acid
  MOD_RES (24)..(24): Variable amino acid that may or may not be present
  MOD_RES (25)..(26): Variable amino acid
  MOD_RES (28)..(33): Variable amino acid
  MOD_RES (35)..(36): Variable amino acid
  MOD_RES (38)..(42): Variable amino acid
  MOD_RES (44)..(47): Variable amino acid
  MOD_RES (48)..(49): Variable amino acid that may or may not be present
  MOD_RES (50)..(54): Variable amino acid
  MOD_RES (56)..(56): Variable amino acid
  MOD_RES (58)..(61): Variable amino acid
  MOD_RES (62)..(62): Variable amino acid that may or may not be present
  MOD_RES (63)..(64): Variable amino acid
  MOD_RES (66)..(69): Variable amino acid
  MOD_RES (70)..(73): Variable amino acid that may or may not be present
  MOD_RES (75)..(75): Variable amino acid
XXXXXXCXXXXXXXCTXXXXXXGXXXCXXXXXXCXXYXXXXXCXXXXXXXXXXXCXWXXXXXXXCXXXXXXXXCX

SEQ ID NO: 247 - protein, 75 aa, Artificial Sequence
  Description of Artificial Sequence: Synthetic amino acid sequence
  MOD_RES (1)..(6): Variable amino acid
  MOD_RES (8)..(13): Variable amino acid
  MOD_RES (14)..(14): Variable amino acid that may or may not be present
  MOD_RES (16)..(19): Variable amino acid
  MOD_RES (20)..(21): Variable amino acid that may or may not be present
  MOD_RES (22)..(23): Variable amino acid
  MOD_RES (24)..(24): Variable amino acid that may or may not be present
  MOD_RES (25)..(26): Variable amino acid
  MOD_RES (28)..(33): Variable amino acid
  MOD_RES (35)..(42): Variable amino acid
  MOD_RES (44)..(47): Variable amino acid
  MOD_RES (48)..(49): Variable amino acid that may or may not be present
  MOD_RES (50)..(54): Variable amino acid
  MOD_RES (56)..(56): Variable amino acid
  MOD_RES (58)..(61): Variable amino acid
  MOD_RES (62)..(62): Variable amino acid that may or may not be present
  MOD_RES (63)..(64): Variable amino acid
  MOD_RES (66)..(69): Variable amino acid
  MOD_RES (70)..(73): Variable amino acid that may or may not be present
  MOD_RES (75)..(75): Variable amino acid
XXXXXXCXXXXXXXCXXXXXXXXXXXCXXXXXXCXXXXXXXXCXXXXXXXXXXXCXWXXXXXXXCXXXXXXXXCX

SEQ ID NO: 248 - protein, 75 aa, Artificial Sequence
  Description of Artificial Sequence: Synthetic amino acid sequence
  MOD_RES (1)..(6): Variable amino acid
  MOD_RES (8)..(13): Variable amino acid
  MOD_RES (14)..(14): Variable amino acid that may or may not be present
  MOD_RES (16)..(19): Variable amino acid
  MOD_RES (20)..(21): Variable amino acid that may or may not be present
  MOD_RES (22)..(23): Variable amino acid
  MOD_RES (24)..(24): Variable amino acid that may or may not be present
  MOD_RES (25)..(26): Variable amino acid
  MOD_RES (28)..(33): Variable amino acid
  MOD_RES (35)..(42): Variable amino acid
  MOD_RES (44)..(47): Variable amino acid
  MOD_RES (48)..(49): Variable amino acid that may or may not be present
  MOD_RES (50)..(54): Variable amino acid
  MOD_RES (56)..(61): Variable amino acid
  MOD_RES (62)..(62): Variable amino acid that may or may not be present
  MOD_RES (63)..(64): Variable amino acid
  MOD_RES (66)..(69): Variable amino acid
  MOD_RES (70)..(73): Variable amino acid that may or may not be present
  MOD_RES (75)..(75): Variable amino acid
XXXXXXCXXXXXXXCXXXXXXXXXXXCXXXXXXCXXXXXXXXCXXXXXXXXXXXCXXXXXXXXXCXXXXXXXXCX

SEQ ID NO: 249 - protein, 24 aa, Artificial Sequence
  Description of Artificial Sequence: Synthetic amino acid sequence
  MOD_RES (2)..(2): Variable amino acid
  MOD_RES (5)..(5): Variable amino acid
  MOD_RES (7)..(7): Variable amino acid
  MOD_RES (9)..(12): Variable amino acid
  MOD_RES (15)..(20): Variable amino acid
  MOD_RES (22)..(24): Variable amino acid
NXCTXDXCXXXXGCXXXXXXCXXX

SEQ ID NO: 250 - protein, 22 aa, Artificial Sequence
  Description of Artificial Sequence: Synthetic amino acid sequence
  MOD_RES (2)..(5): Variable amino acid
  MOD_RES (7)..(11): Variable amino acid
  MOD_RES (13)..(18): Variable amino acid
  MOD_RES (20)..(22): Variable amino acid
CXXXXCXXXXXCXXXXXXCXXX

SEQ ID NO: 251 - protein, 23 aa, Artificial Sequence
  Description of Artificial Sequence: Synthetic amino acid sequence
  MOD_RES (1)..(4): Variable amino acid
  MOD_RES (5)..(5): Cys or variable amino acid
  MOD_RES (6)..(7): Variable amino acid
  MOD_RES (9)..(11): Variable amino acid
  MOD_RES (12)..(12): Cys or variable amino acid
  MOD_RES (13)..(14): Variable amino acid
  MOD_RES (16)..(18): Variable amino acid
  MOD_RES (20)..(23): Variable amino acid
XXXXXXXCXXXXXXCXXXCXXXX

SEQ ID NO: 252 - protein, 18 aa, Artificial Sequence
  Description of Artificial Sequence: Synthetic amino acid sequence
  MOD_RES (1)..(2): Variable amino acid
  MOD_RES (4)..(6): Variable amino acid
  MOD_RES (8)..(10): Variable amino acid
  MOD_RES (12)..(13): Variable amino acid
  MOD_RES (14)..(14): Variable amino acid that may or may not be present
  MOD_RES (15)..(15): Variable amino acid
  MOD_RES (17)..(18): Variable amino acid
XXCXXXCXXXCXXXXCXX

SEQ ID NO: 253 - protein, 37 aa, Artificial Sequence
  Description of Artificial Sequence: Synthetic amino acid sequence
  MOD_RES (3)..(4): Variable amino acid
  MOD_RES (6)..(8): Variable amino acid
  MOD_RES (10)..(13): May or may not be present
  MOD_RES (15)..(15): Variable amino acid
  MOD_RES (17)..(19): Variable amino acid
  MOD_RES (22)..(22): Variable amino acid
  MOD_RES (24)..(25): Variable amino acid
  MOD_RES (27)..(31): Variable amino acid
  MOD_RES (33)..(34): Variable amino acid
  MOD_RES (36)..(36): Variable amino acid
CTXXGXXXCVILMCXGXXXCGXGXXCXXXXXGXXNXC

SEQ ID NO: 254 - protein, 34 aa, Artificial Sequence
  Description of Artificial Sequence: Synthetic amino acid sequence
  MOD_RES (2)..(4): Variable amino acid
  MOD_RES (6)..(8): Variable amino acid
  MOD_RES (10)..(10): Variable amino acid
  MOD_RES (12)..(12): Variable amino acid
  MOD_RES (14)..(16): Variable amino acid
  MOD_RES (19)..(19): Variable amino acid
  MOD_RES (21)..(22): Variable amino acid
  MOD_RES (24)..(28): Variable amino acid
  MOD_RES (30)..(33): Variable amino acid
CXXXGXXXCXCXGXXXCGXGXXCXXXXXGXXXXC

SEQ ID NO: 255 - protein, 34 aa, Artificial Sequence
  Description of Artificial Sequence: Synthetic amino acid sequence
  MOD_RES (2)..(8): Variable amino acid
  MOD_RES (10)..(10): Variable amino acid
  MOD_RES (12)..(16): Variable amino acid
  MOD_RES (18)..(22): Variable amino acid
  MOD_RES (24)..(33): Variable amino acid
CXXXXXXXCXCXXXXXCXXXXXCXXXXXXXXXXC

SEQ ID NO: 256 - protein, 73 aa, Artificial Sequence
  Description of Artificial Sequence: Synthetic amino acid sequence
  MOD_RES (2)..(5): Variable amino acid
  MOD_RES (7)..(11): Variable amino acid
  MOD_RES (13)..(15): Variable amino acid
  MOD_RES (16)..(16): Variable amino acid that may or may not be present
  MOD_RES (17)..(22): Variable amino acid
  MOD_RES (24)..(24): Variable amino acid
  MOD_RES (25)..(25): Variable amino acid that may or may not be present
  MOD_RES (27)..(29): Variable amino acid
  MOD_RES (31)..(36): Variable amino acid
  MOD_RES (37)..(37): Variable amino acid that may or may not be present
  MOD_RES (38)..(40): Variable amino acid
  MOD_RES (42)..(43): Variable amino acid
  MOD_RES (45)..(46): Variable amino acid
  MOD_RES (49)..(51): Variable amino acid
  MOD_RES (53)..(56): Variable amino acid
  MOD_RES (58)..(58): Variable amino acid
  MOD_RES (60)..(70): Variable amino acid
  MOD_RES (72)..(72): Variable amino acid
CXXXXCXXXXXCXXXXXXXXXXCXXCXXXCXXXXXXXXXXCXXDXXTYXXXCXXXXAXCXXXXXXXXXXXGXC

SEQ ID NO: 257 - protein, 73 aa, Artificial Sequence
  Description of Artificial Sequence: Synthetic amino acid sequence
  MOD_RES (2)..(5): Variable amino acid
  MOD_RES (7)..(11): Variable amino acid
  MOD_RES (13)..(15): Variable amino acid
  MOD_RES (16)..(16): Variable amino acid that may or may not be present
  MOD_RES (17)..(22): Variable amino acid
  MOD_RES (24)..(24): Variable amino acid
  MOD_RES (25)..(25): Variable amino acid that may or may not be present
  MOD_RES (27)..(29): Variable amino acid
  MOD_RES (31)..(36): Variable amino acid
  MOD_RES (37)..(37): Variable amino acid that may or may not be present
  MOD_RES (38)..(40): Variable amino acid
  MOD_RES (42)..(51): Variable amino acid
  MOD_RES (53)..(58): Variable amino acid
  MOD_RES (60)..(72): Variable amino acid
CXXXXCXXXXXCXXXXXXXXXXCXXCXXXCXXXXXXXXXXCXXXXXXXXXXCXXXXXXCXXXXXXXXXXXXXC

SEQ ID NO: 258 - protein, 19 aa, Artificial Sequence
  Description of Artificial Sequence: Synthetic amino acid sequence
IVMLFYSNRAHQTGWKPED

SEQ ID NO: 259 - protein, 12 aa, Artificial Sequence
  Description of Artificial Sequence: Synthetic amino acid sequence
  MOD_RES (2)..(6): Variable amino acid
  MOD_RES (9)..(11): Variable amino acid
CXXXXXCCXXXC

SEQ ID NO: 260 - protein, 36 aa, Artificial Sequence
  Description of Artificial Sequence: Synthetic amino acid sequence
  MOD_RES (2)..(7): Variable amino acid
  MOD_RES (9)..(14): Variable amino acid
  MOD_RES (16)..(21): Variable amino acid
  MOD_RES (23)..(28): Variable amino acid
  MOD_RES (30)..(35): Variable amino acid
CXXXXXXCXXXXXXCXXXXXXCXXXXXXCXXXXXXC

SEQ ID NO: 261 - protein, 50 aa, Artificial Sequence
  Description of Artificial Sequence: Synthetic amino acid sequence
  MOD_RES (2)..(7): Variable amino acid
  MOD_RES (9)..(14): Variable amino acid
  MOD_RES (16)..(21): Variable amino acid
  MOD_RES (23)..(28): Variable amino acid
  MOD_RES (30)..(35): Variable amino acid
  MOD_RES (37)..(42): Variable amino acid
  MOD_RES (44)..(49): Variable amino acid
CXXXXXXCXXXXXXCXXXXXXCXXXXXXCXXXXXXCXXXXXXCXXXXXXC

SEQ ID NO: 262 - protein, 31 aa, Artificial Sequence
  Description of Artificial Sequence: Synthetic amino acid sequence
  MOD_RES (2)..(6): Variable amino acid
  MOD_RES (8)..(12): Variable amino acid
  MOD_RES (14)..(18): Variable amino acid
  MOD_RES (20)..(24): Variable amino acid
  MOD_RES (26)..(30): Variable amino acid
CXXXXXCXXXXXCXXXXXCXXXXXCXXXXXC

SEQ ID NO: 263 - protein, 43 aa, Artificial Sequence
  Description of Artificial Sequence: Synthetic amino acid sequence
  MOD_RES (2)..(6): Variable amino acid
  MOD_RES (8)..(12): Variable amino acid
  MOD_RES (14)..(18): Variable amino acid
  MOD_RES (20)..(24): Variable amino acid
  MOD_RES (26)..(30): Variable amino acid
  MOD_RES (32)..(36): Variable amino acid
  MOD_RES (38)..(42): Variable amino acid
CXXXXXCXXXXXCXXXXXCXXXXXCXXXXXCXXXXXCXXXXXC

SEQ ID NO: 264 - protein, 39 aa, Artificial Sequence
  Description of Artificial Sequence: Synthetic amino acid sequence
  MOD_RES (2)..(3): Variable amino acid that may or may not be present
  MOD_RES (4)..(5): Variable amino acid
  MOD_RES (9)..(9): Variable amino acid
  MOD_RES (11)..(11): Variable amino acid
  MOD_RES (14)..(15): Variable amino acid
  MOD_RES (19)..(19): Variable amino acid
  MOD_RES (21)..(22): Variable amino acid
  MOD_RES (23)..(23): Pro or Ser
  MOD_RES (24)..(24): Variable amino acid
  MOD_RES (26)..(27): Variable amino acid that may or may not be present
  MOD_RES (28)..(30): Variable amino acid
  MOD_RES (32)..(32): Variable amino acid
  MOD_RES (34)..(36): Variable amino acid
  MOD_RES (37)..(38): Variable amino acid that may or may not be present
CXXXXEDSXDXCDXXGDCXWXXXXCXXXXXCXFXXXXXC

SEQ ID NO: 265 - protein, 42 aa, Artificial Sequence
  Description of Artificial Sequence: Synthetic amino acid sequence
  MOD_RES (2)..(2): Variable amino acid
  MOD_RES (3)..(5): Variable amino acid that may or may not be present
  MOD_RES (6)..(6): Variable amino acid
  MOD_RES (8)..(8): Variable amino acid
  MOD_RES (10)..(12): Variable amino acid
  MOD_RES (13)..(15): Variable amino acid that may or may not be present
  MOD_RES (17)..(18): Variable amino acid
  MOD_RES (19)..(20): Variable amino acid that may or may not be present
  MOD_RES (21)..(23): Variable amino acid
  MOD_RES (27)..(28): Variable amino acid
  MOD_RES (31)..(31): Variable amino acid
  MOD_RES (33)..(33): Variable amino acid
  MOD_RES (37)..(40): Variable amino acid that may or may not be present
  MOD_RES (41)..(41): Variable amino acid
CXXXXXFXCXXXXXXCXXXXXXXCDGXXDCXDXSDEXXXXXC

SEQ ID NO: 266 - protein, 42 aa, Artificial Sequence; identical to SEQ ID NO: 265
  Description of Artificial Sequence: Synthetic amino acid sequence
  MOD_RES (2)..(2): Variable amino acid
  MOD_RES (3)..(5): Variable amino acid that may or may not be present
  MOD_RES (6)..(6): Variable amino acid
  MOD_RES (8)..(8): Variable amino acid
  MOD_RES (10)..(12): Variable amino acid
  MOD_RES (13)..(15): Variable amino acid that may or may not be present
  MOD_RES (17)..(18): Variable amino acid
  MOD_RES (19)..(20): Variable amino acid that may or may not be present
  MOD_RES (21)..(23): Variable amino acid
  MOD_RES (27)..(28): Variable amino acid
  MOD_RES (31)..(31): Variable amino acid
  MOD_RES (33)..(33): Variable amino acid
  MOD_RES (37)..(40): Variable amino acid that may or may not be present
  MOD_RES (41)..(41): Variable amino acid

SEQ ID NO: 267 - protein, 42 aa, Artificial Sequence; identical to SEQ ID NO: 265
  Description of Artificial Sequence: Synthetic amino acid sequence
  MOD_RES (2)..(2): Variable amino acid
  MOD_RES (3)..(5): Variable amino acid that may or may not be present
  MOD_RES (6)..(6): Variable amino acid
  MOD_RES (8)..(8): Variable amino acid
  MOD_RES (10)..(12): Variable amino acid
  MOD_RES (13)..(15): Variable amino acid that may or may not be present
  MOD_RES (17)..(18): Variable amino acid
  MOD_RES (19)..(20): Variable amino acid that may or may not be present
  MOD_RES (21)..(23): Variable amino acid
  MOD_RES (27)..(28): Variable amino acid
  MOD_RES (31)..(31): Variable amino acid
  MOD_RES (33)..(33): Variable amino acid
  MOD_RES (37)..(40): Variable amino acid that may or may not be present
  MOD_RES (41)..(41): Variable amino acid

SEQ ID NO: 268 - protein, 39 aa, Artificial Sequence
  Description of Artificial Sequence: Synthetic amino acid sequence
  MOD_RES (2)..(3): Variable amino acid that may or may not be present
  MOD_RES (4)..(11): Variable amino acid
  MOD_RES (13)..(17): Variable amino acid
  MOD_RES (19)..(24): Variable amino acid
  MOD_RES (26)..(27): Variable amino acid that may or may not be present
  MOD_RES (28)..(30): Variable amino acid
  MOD_RES (32)..(36): Variable amino acid
  MOD_RES (37)..(38): Variable amino acid that may or may not be present
CXXXXXXXXXXCXXXXXCXXXXXXCXXXXXCXXXXXXXC

SEQ ID NO: 269 - protein, 42 aa, Artificial Sequence
  Description of Artificial Sequence: Synthetic amino acid sequence
  MOD_RES (2)..(2): Variable amino acid
  MOD_RES (3)..(3): Ala, Pro or Ser
  MOD_RES (4)..(4): Variable amino acid that may or may not be present
  MOD_RES (5)..(5): Glu, Lys or Gln
  MOD_RES (7)..(7): Variable amino acid
  MOD_RES (9)..(12): Variable amino acid
  MOD_RES (13)..(13): Variable amino acid that may or may not be present
  MOD_RES (15)..(15): Ile, Leu or Val
  MOD_RES (16)..(16): Pro or Ser
  MOD_RES (17)..(18): Variable amino acid
  MOD_RES (19)..(19): Leu or Trp
  MOD_RES (20)..(20): Leu, Arg or Val
  MOD_RES (24)..(24): Asp, Glu or Val
  MOD_RES (25)..(25): Pro, Asn or Asp
  MOD_RES (28)..(28): Variable amino acid
  MOD_RES (30)..(30): Asp, Gly, Asn or Ser
  MOD_RES (34)..(39): May or may not be present
  MOD_RES (40)..(41): Variable amino acid
CXXXXFXCXXXXXCXXXXXXCDGXXDCXDXSDEAPSLPSXXC

SEQ ID NO: 270 - protein, 42 aa, Artificial Sequence
  Description of Artificial Sequence: Synthetic amino acid sequence
  MOD_RES (2)..(2): Variable amino acid
  MOD_RES (3)..(4): Variable amino acid that may or may not be present
  MOD_RES (5)..(7): Variable amino acid
  MOD_RES (8)..(8): Any amino acid except Phe
  MOD_RES (9)..(9): Variable amino acid
  MOD_RES (11)..(14): Variable amino acid
  MOD_RES (15)..(16): Variable amino acid that may or may not be present
  MOD_RES (18)..(23): Variable amino acid
  MOD_RES (25)..(28): Variable amino acid
  MOD_RES (29)..(29): Any amino acid except Asp
  MOD_RES (31)..(31): Variable amino acid
  MOD_RES (32)..(32): Variable amino acid that may or may not be present
  MOD_RES (33)..(35): Variable amino acid
  MOD_RES (36)..(36): Any amino acid except Asp
  MOD_RES (37)..(37): Any amino acid except Glu
  MOD_RES (38)..(38): Variable amino acid that may or may not be present
  MOD_RES (39)..(41): Variable amino acid
CXXXXXXXXCXXXXXXCXXXXXXCXXXXXCXXXXXXXXXXXC

SEQ ID NO: 271 - protein, 42 aa, Artificial Sequence; identical to SEQ ID NO: 270
  Description of Artificial Sequence: Synthetic amino acid sequence
  MOD_RES (2)..(2): Variable amino acid
  MOD_RES (3)..(4): Variable amino acid that may or may not be present
  MOD_RES (5)..(7): Variable amino acid
  MOD_RES (8)..(8): Any amino acid except Phe
  MOD_RES (9)..(9): Variable amino acid
  MOD_RES (11)..(14): Variable amino acid
  MOD_RES (15)..(16): Variable amino acid that may or may not be present
  MOD_RES (18)..(18): Any amino acid except Ile, Leu or Val
  MOD_RES (19)..(19): Any amino acid except Pro or Ser
  MOD_RES (20)..(23): Variable amino acid
  MOD_RES (25)..(25): Any amino acid except Asp
  MOD_RES (26)..(26): Any amino acid except Gly
  MOD_RES (27)..(28): Variable amino acid
  MOD_RES (29)..(29): Any amino acid except Asp
  MOD_RES (31)..(31): Variable amino acid
  MOD_RES (32)..(32): Variable amino acid that may or may not be present
  MOD_RES (33)..(33): Any amino acid except Asp
  MOD_RES (34)..(34): Variable amino acid
  MOD_RES (35)..(35): Any amino acid except Ser
  MOD_RES (36)..(36): Any amino acid except Asp
  MOD_RES (37)..(37): Any amino acid except Glu
  MOD_RES (38)..(38): Variable amino acid that may or may not be present
  MOD_RES (39)..(41): Variable amino acid

SEQ ID NO: 272 - protein, 15 aa, Artificial Sequence
  Description of Artificial Sequence: Synthetic amino acid sequence
  MOD_RES (2)..(2): Variable amino acid
  MOD_RES (4)..(4): Variable amino acid
  MOD_RES (6)..(6): Variable amino acid
  MOD_RES (8)..(8): Variable amino acid
  MOD_RES (10)..(10): Variable amino acid
  MOD_RES (12)..(12): Variable amino acid
  MOD_RES (14)..(14): Variable amino acid
CXCXCXCXCXCXCXC

SEQ ID NO: 273 - protein, 180 aa, Artificial Sequence
  Description of Artificial Sequence: Synthetic amino acid sequence
  MOD_RES (2)..(4): Variable amino acid
  MOD_RES (6)..(6): Variable amino acid
  MOD_RES (8)..(11): Variable amino acid
  MOD_RES (13)..(14): Variable amino acid
  MOD_RES (17)..(18): Variable amino acid
  MOD_RES (20)..(22): Variable amino acid
  MOD_RES (24)..(24): Variable amino acid
  MOD_RES (26)..(29): Variable amino acid
  MOD_RES (31)..(32): Variable amino acid
  MOD_RES (35)..(36): Variable amino acid
  MOD_RES (38)..(40): Variable amino acid
  MOD_RES (42)..(42): Variable amino acid
  MOD_RES (44)..(47): Variable amino acid
  MOD_RES (49)..(50): Variable amino acid
  MOD_RES (53)..(54): Variable amino acid
  MOD_RES (56)..(58): Variable amino acid
  MOD_RES (60)..(60): Variable amino acid
  MOD_RES (62)..(65): Variable amino acid
  MOD_RES (67)..(68): Variable amino acid
  MOD_RES (71)..(72): Variable amino acid
  MOD_RES (74)..(76): Variable amino acid
  MOD_RES (78)..(78): Variable amino acid
  MOD_RES (80)..(83): Variable amino acid
  MOD_RES (85)..(86): Variable amino acid
  MOD_RES (89)..(90): Variable amino acid
  MOD_RES (92)..(94): Variable amino acid
  MOD_RES (96)..(96): Variable amino acid
  MOD_RES (98)..(101): Variable amino acid
  MOD_RES (103)..(104): Variable amino acid
  MOD_RES (107)..(108): Variable amino acid
  MOD_RES (110)..(112): Variable amino acid
  MOD_RES (114)..(114): Variable amino acid
  MOD_RES (116)..(119): Variable amino acid
  MOD_RES (121)..(122): Variable amino acid
  MOD_RES (125)..(126): Variable amino acid
  MOD_RES (128)..(130): Variable amino acid
  MOD_RES (132)..(132): Variable amino acid
  MOD_RES (134)..(137): Variable amino acid
  MOD_RES (139)..(140): Variable amino acid
  MOD_RES (143)..(144): Variable amino acid
  MOD_RES (146)..(148): Variable amino acid
  MOD_RES (150)..(150): Variable amino acid
  MOD_RES (152)..(155): Variable amino acid
  MOD_RES (157)..(158): Variable amino acid
  MOD_RES (161)..(162): Variable amino acid
  MOD_RES (164)..(166): Variable amino acid
  MOD_RES (168)..(168): Variable amino acid
  MOD_RES (170)..(173): Variable amino acid
  MOD_RES (175)..(176): Variable amino acid
  MOD_RES (179)..(180): Variable amino acid
  This sequence may encompass 1 to 10 "Cys-Xaa-Xaa-Xaa-Cys- Xaa-Cys-Xaa-Xaa-Xaa-Xaa-Cys-Xaa-Xaa-Cys-Cys-Xaa-Xaa" repeating units
CXXXCXCXXXXCXXCCXXCXXXCXCXXXXCXXCCXXCXXXCXCXXXXCXXCCXXCXXXCXCXXXXCXXCCXXCXXXCXCXXXXCXXCCXXCXXXCXCXXXXCXXCCXXCXXXCXCXXXXCXXCCXXCXXXCXCXXXXCXXCCXXCXXXCXCXXXXCXXCCXXCXXXCXCXXXXCXXCCXX

SEQ ID NO: 274 - protein, 6 aa, Artificial Sequence
  Description of Artificial Sequence: Synthetic amino acid sequence
  MOD_RES (2)..(2): Variable amino acid
  MOD_RES (4)..(4): Variable amino acid
  MOD_RES (6)..(6): Variable amino acid
CXCXCX

SEQ ID NO: 275 - protein, 37 aa, Artificial Sequence
  Description of Artificial Sequence: Synthetic amino acid sequence
  MOD_RES (2)..(4): Variable amino acid
  MOD_RES (5)..(5): Variable amino acid that may or may not be present
  MOD_RES (7)..(8): Variable amino acid
  MOD_RES (10)..(13): Variable amino acid
  MOD_RES (14)..(15): Variable amino acid that may or may not be present
  MOD_RES (17)..(19): Variable amino acid
  MOD_RES (21)..(23): Variable amino acid
  MOD_RES (24)..(24): Variable amino acid that may or may not be present
  MOD_RES (25)..(26): Variable amino acid
  MOD_RES (28)..(31): Variable amino acid
  MOD_RES (32)..(32): Variable amino acid that may or may not be present
  MOD_RES (34)..(36): Variable amino acid
CXXXXCXXCXXXXXXCXXXCXXXXXXCXXXXXCXXXC

SEQ ID NO: 276 - protein, 10 aa, Artificial Sequence
  Description of Artificial Sequence: Synthetic amino acid sequence
  MOD_RES (2)..(2): Variable amino acid
  MOD_RES (4)..(4): Variable amino acid
  MOD_RES (7)..(7): Variable amino acid
  MOD_RES (9)..(9): Variable amino acid
CXCXCCXCXC

SEQ ID NO: 277 - protein, 58 aa, Artificial Sequence
  Description of Artificial Sequence: Synthetic amino acid sequence
  MOD_RES (2)..(7): Variable amino acid
  MOD_RES (8)..(14): Variable amino acid that may or may not be present
  MOD_RES (16)..(21): Variable amino acid
  MOD_RES (22)..(28): Variable amino acid that may or may not be present
  MOD_RES (31)..(36): Variable amino acid
  MOD_RES (37)..(43): Variable amino acid that may or may not be present
  MOD_RES (45)..(50): Variable amino acid
  MOD_RES (51)..(57): Variable amino acid that may or may not be present
CXXXXXXXXXXXXXCXXXXXXXXXXXXXCCXXXXXXXXXXXXXCXXXXXXXXXXXXXC

SEQ ID NO: 278 - protein, 33 aa, Artificial Sequence
  Description of Artificial Sequence: Synthetic amino acid sequence
  MOD_RES (2)..(7): Variable amino acid
  MOD_RES (9)..(14): Variable amino acid
  MOD_RES (17)..(20): Variable amino acid
  MOD_RES (22)..(32): Variable amino acid
CXXXXXXCXXXXXXCCXXXXCXXXXXXXXXXXC

SEQ ID NO: 279 - protein, 32 aa, Artificial Sequence
  Description of Artificial Sequence: Synthetic amino acid sequence
  MOD_RES (2)..(7): Variable amino acid
  MOD_RES (9)..(16): Variable amino acid
  MOD_RES (19)..(23): Variable amino acid
  MOD_RES (25)..(31): Variable amino acid
CXXXXXXCXXXXXXXXCCXXXXXCXXXXXXXC

SEQ ID NO: 280 - protein, 32 aa, Artificial Sequence
  Description of Artificial Sequence: Synthetic amino acid sequence
  MOD_RES (2)..(7): Variable amino acid
  MOD_RES (9)..(14): Variable amino acid
  MOD_RES (17)..(21): Variable amino acid
  MOD_RES (23)..(28): Variable amino acid
  MOD_RES (30)..(32): Variable amino acid
CXXXXXXCXXXXXXCCXXXXXCXXXXXXCXXX

SEQ ID NO: 281 - protein, 33 aa, Artificial Sequence
  Description of Artificial Sequence: Synthetic amino acid sequence
  MOD_RES (2)..(7): Variable amino acid
  MOD_RES (9)..(14): Variable amino acid
  MOD_RES (17)..(20): Variable amino acid
  MOD_RES (22)..(30): Variable amino acid
  MOD_RES (32)..(33): Variable amino acid
CXXXXXXCXXXXXXCCXXXXCXXXXXXXXXCXX

SEQ ID NO: 282 - protein, 32 aa, Artificial Sequence; identical to SEQ ID NO: 143
  Description of Artificial Sequence: Synthetic amino acid sequence
  MOD_RES (2)..(7): Variable amino acid
  MOD_RES (9)..(15): Variable amino acid
  MOD_RES (18)..(21): Variable amino acid
  MOD_RES (23)..(23): Variable amino acid
  MOD_RES (25)..(29): Variable amino acid
  MOD_RES (31)..(31): Variable amino acid

SEQ ID NO: 283 - protein, 37 aa, Artificial Sequence
  Description of Artificial Sequence: Synthetic amino acid sequence
  MOD_RES (2)..(9): Variable amino acid
  MOD_RES (11)..(14): Variable amino acid
  MOD_RES (17)..(21): Variable amino acid
  MOD_RES (23)..(28): Variable amino acid
  MOD_RES (30)..(32): Variable amino acid
  MOD_RES (34)..(36): Variable amino acid
CXXXXXXXXCXXXXCCXXXXXCXXXXXXCXXXCXXXC

SEQ ID NO: 284 - protein, 33 aa, Artificial Sequence; identical to SEQ ID NO: 281
  Description of Artificial Sequence: Synthetic amino acid sequence
  MOD_RES (2)..(7): Variable amino acid
  MOD_RES (9)..(14): Variable amino acid
  MOD_RES (17)..(20): Variable amino acid
  MOD_RES (22)..(30): Variable amino acid
  MOD_RES (32)..(33): Variable amino acid

SEQ ID NO: 285 - protein, 32 aa, Artificial Sequence; identical to SEQ ID NO: 143
  Description of Artificial Sequence: Synthetic amino acid sequence
  MOD_RES (2)..(7): Variable amino acid
  MOD_RES (9)..(15): Variable amino acid
  MOD_RES (18)..(21): Variable amino acid
  MOD_RES (23)..(23): Variable amino acid
  MOD_RES (25)..(29): Variable amino acid
  MOD_RES (31)..(31): Variable amino acid

SEQ ID NO: 286 - protein, 37 aa, Artificial Sequence; identical to SEQ ID NO: 283
  Description of Artificial Sequence: Synthetic amino acid sequence
  MOD_RES (2)..(9): Variable amino acid
  MOD_RES (11)..(14): Variable amino acid
  MOD_RES (17)..(21): Variable amino acid
  MOD_RES (23)..(28): Variable amino acid
  MOD_RES (30)..(32): Variable amino acid
  MOD_RES (34)..(36): Variable amino acid

SEQ ID NO: 287 - protein, 33 aa, Artificial Sequence; identical to SEQ ID NO: 278
  Description of Artificial Sequence: Synthetic amino acid sequence
  MOD_RES (2)..(7): Variable amino acid
  MOD_RES (9)..(14): Variable amino acid
  MOD_RES (17)..(20): Variable amino acid
  MOD_RES (22)..(32): Variable amino acid

SEQ ID NO: 288 - protein, 32 aa, Artificial Sequence; identical to SEQ ID NO: 279
  Description of Artificial Sequence: Synthetic amino acid sequence
  MOD_RES (2)..(7): Variable amino acid
  MOD_RES (9)..(16): Variable amino acid
  MOD_RES (19)..(23): Variable amino acid
  MOD_RES (25)..(31): Variable amino acid

SEQ ID NO: 289 - protein, 32 aa, Artificial Sequence; identical to SEQ ID NO: 280
  Description of Artificial Sequence: Synthetic amino acid sequence
  MOD_RES (2)..(7): Variable amino acid
  MOD_RES (9)..(14): Variable amino acid
  MOD_RES (17)..(21): Variable amino acid
  MOD_RES (23)..(28): Variable amino acid
  MOD_RES (30)..(32): Variable amino acid

SEQ ID NO: 290 - protein, 33 aa, Artificial Sequence; identical to SEQ ID NO: 281
  Description of Artificial Sequence: Synthetic amino acid sequence
  MOD_RES (2)..(7): Variable amino acid
  MOD_RES (9)..(14): Variable amino acid
  MOD_RES (17)..(20): Variable amino acid
  MOD_RES (22)..(30): Variable amino acid
  MOD_RES (32)..(33): Variable amino acid

SEQ ID NO: 291 - protein, 32 aa, Artificial Sequence; identical to SEQ ID NO: 143
  Description of Artificial Sequence: Synthetic amino acid sequence
  MOD_RES (2)..(7): Variable amino acid
  MOD_RES (9)..(15): Variable amino acid
  MOD_RES (18)..(21): Variable amino acid
  MOD_RES (23)..(23): Variable amino acid
  MOD_RES (25)..(29): Variable amino acid
  MOD_RES (31)..(31): Variable amino acid

SEQ ID NO: 292 - protein, 37 aa, Artificial Sequence; identical to SEQ ID NO: 283
  Description of Artificial Sequence: Synthetic amino acid sequence
  MOD_RES (2)..(9): Variable amino acid
  MOD_RES (11)..(14): Variable amino acid
  MOD_RES (17)..(21): Variable amino acid
  MOD_RES (23)..(28): Variable amino acid
  MOD_RES (30)..(32): Variable amino acid
  MOD_RES (34)..(36): Variable amino acid

SEQ ID NO: 293 - protein, 37 aa, Artificial Sequence
  Description of Artificial Sequence: Synthetic amino acid sequence
  MOD_RES (2)..(7): Variable amino acid
  MOD_RES (9)..(14): Variable amino acid
  MOD_RES (17)..(18): Variable amino acid
  MOD_RES (20)..(21): Variable amino acid
  MOD_RES (23)..(23): Variable amino acid
  MOD_RES (25)..(30): Variable amino acid
  MOD_RES (32)..(32): Variable amino acid
  MOD_RES (34)..(36): Variable amino acid
CXXXXXXCXXXXXXCCXXCXXCXCXXXXXXCXCXXXC

SEQ ID NO: 294 - protein, 34 aa, Artificial Sequence; identical to SEQ ID NO: 140
  Description of Artificial Sequence: Synthetic amino acid sequence
  MOD_RES (2)..(8): Variable amino acid
  MOD_RES (10)..(15): Variable amino acid
  MOD_RES (18)..(22): Variable amino acid
  MOD_RES (24)..(24): Variable amino acid
  MOD_RES (26)..(31): Variable amino acid
  MOD_RES (33)..(33): Variable amino acid

SEQ ID NO: 295 - protein, 27 aa, Artificial Sequence
  Description of Artificial Sequence: Synthetic amino acid sequence
  MOD_RES (2)..(4): Variable amino acid
  MOD_RES (6)..(10): Variable amino acid
  MOD_RES (12)..(15): Variable amino acid
  MOD_RES (17)..(17): Variable amino acid
  MOD_RES (19)..(26): Variable amino acid
CXXXCXXXXXCXXXXCXCXXXXXXXXC

SEQ ID NO: 296 - protein, 34 aa, Artificial Sequence
  Description of Artificial Sequence: Synthetic amino acid sequence
  MOD_RES (2)..(21): Variable amino acid
  MOD_RES (24)..(25): Variable amino acid
  MOD_RES (28)..(30): Variable amino acid
  MOD_RES (32)..(33): Variable amino acid
CXXXXXXXXXXXXXXXXXXXXCCXXCCXXXCXXC

SEQ ID NO: 297 - protein, 6 aa, Artificial Sequence
  Description of Artificial Sequence: Synthetic fragment/hydra sequence
SKVILF

SEQ ID NO: 298 - protein, 7 aa, Artificial Sequence
  Description of Artificial Sequence: Synthetic amino acid sequence
SKVILFE

SEQ ID NO: 299 - protein, 16 aa, Artificial Sequence
  Description of Artificial Sequence: Synthetic amino acid sequence
RARADADARARADADA

SEQ ID NO: 300 - protein, 6 aa, Artificial Sequence
  Description of Artificial Sequence: Synthetic amino acid sequence
RARARA

SEQ ID NO: 301 - protein, 6 aa, Artificial Sequence
  Description of Artificial Sequence: Synthetic amino acid sequence
DADADA

SEQ ID NO: 302 - protein, 64 aa, Laticauda sp.
TRICFNHQSSQPQTTKTCSPGESSCYNKQWSDFRGTIIERGCGCPTVKPGIKLSCCESEVCNNA

SEQ ID NO: 303 - protein, 41 aa, Laticauda sp.
EESCKGRCGEGFNRGKECQCDELCKYYQSCCPDYESVCKPK

SEQ ID NO: 304 - protein, 30 aa, Artificial Sequence
  Description of Artificial Sequence: Synthetic amino acid sequence
  MOD_RES (4)..(8): Variable amino acid
  MOD_RES (16)..(17): Variable amino acid
  MOD_RES (24)..(24): Variable amino acid
  MOD_RES (26)..(26): Variable amino acid
GCPXXXXXCKQDSDCXXGCVCZPXGXCGSP

SEQ ID NO: 305 - DNA, 68 bp, Artificial Sequence
  Description of Artificial Sequence: Synthetic amino acid sequence
  modified_base (34)..(34): a, c, g, t, unknown or other
  modified_base (37)..(37): a, c, g, t, unknown or other
  modified_base (40)..(40): a, c, g, t, unknown or other
  modified_base (43)..(43): a, c, g, t, unknown or other
  modified_base (46)..(46): a, c, g, t, unknown or other
caggcagcgggcccgtctggcccgggttgtcctnhknhknhknhknhktgtaaacaagactctgactg

SEQ ID NO: 306 - DNA, 180 bp, Artificial Sequence
  Description of Artificial Sequence: Synthetic amino acid sequence
  modified_base (22)..(22): a, c, g, t, unknown or other
  modified_base (25)..(25): a, c, g, t, unknown or other
  modified_base (41)..(41): a, c, g, t, unknown or other
  modified_base (46)..(46): a, c, g, t, unknown or other
  modified_base (52)..(52): a, c, g, t, unknown or other
  modified_base (129)..(129): a, c, g, t, unknown or other
  modified_base (135)..(135): a, c, g, t, unknown or other
  modified_base (140)..(140): a, c, g, t, unknown or other
  modified_base (156)..(156): a, c, g, t, unknown or other
  modified_base (159)..(159): a, c, g, t, unknown or other
tgtaaacaagactctgactgtnhknhkggttgcgtttgcvnkccgnhkggtnhktgtggctctccgggccagtctggtggttccggtcacgtgaccggaaccaccagactggcccggagagccacamdnaccmdncggmnbgcaaacgcaaccmdnmdnacagtcagagtcttgtttaca

SEQ ID NO: 307 - protein, 48 aa, Artificial Sequence
  Description of Artificial Sequence: Synthetic amino acid sequence
GPSGPGCPILYAHCKQDSDCVTGCVCRPLGMCGSPGQSGGSGHHHHHH

SEQ ID NO: 308 - protein, 48 aa, Artificial Sequence
  Description of Artificial Sequence: Synthetic amino acid sequence
GPSGPGCPSLPTPCKQDSDCDEGCVCKPNGTCGSPGQSGGSGHHHHHH

SEQ ID NO: 309 - protein, 48 aa, Artificial Sequence
  Description of Artificial Sequence: Synthetic amino acid sequence
GPSGPGCPLYSPVCKQDSDCDNGCVCRPAGPCGSPGQSGGSGHHHHHH

SEQ ID NO: 310 - protein, 44 aa, Artificial Sequence
  Description of Artificial Sequence: Synthetic amino acid sequence
  MOD_RES (2)..(6): Variable amino acid
  MOD_RES (7)..(10): Variable amino acid that may or may not be present
  MOD_RES (11)..(13): Variable amino acid
  MOD_RES (15)..(20): Variable amino acid
  MOD_RES (22)..(25): Variable amino acid
  MOD_RES (26)..(28): Variable amino acid that may or may not be present
  MOD_RES (30)..(31): Variable amino acid that may or may not be present
  MOD_RES (32)..(39): Variable amino acid
  MOD_RES (41)..(43): Variable amino acid
CXXXXXXXXXXXXCXXXXXXCXXXXXXXCXXXXXXXXXXCXXXC

SEQ ID NO: 311 - protein, 45 aa, Artificial Sequence
  Description of Artificial Sequence: Synthetic amino acid sequence
  MOD_RES (2)..(6): Variable amino acid
  MOD_RES (7)..(10): Variable amino acid that may or may not be present
  MOD_RES (11)..(13): Variable amino acid
  MOD_RES (15)..(20): Variable amino acid
  MOD_RES (23)..(23): Variable amino acid
  MOD_RES (25)..(25): Variable amino acid
  MOD_RES (26)..(27): May or may not be present
  MOD_RES (28)..(29): Variable amino acid that may or may not be present
  MOD_RES (31)..(32): Variable amino acid that may or may not be present
  MOD_RES (33)..(39): Variable amino acid
  MOD_RES (42)..(44): Variable amino acid
CXXXXXXXXXXXXCXXXXXXCYXKXWFXXCXXXXXXXXXGCXXXC

SEQ ID NO: 312 - protein, 29 aa, Artificial Sequence
  Description of Artificial Sequence: Synthetic amino acid sequence
  MOD_RES (2)..(6): Variable amino acid
  MOD_RES (8)..(10): Variable amino acid
  MOD_RES (12)..(21): Variable amino acid
  MOD_RES (23)..(26): Variable amino acid
  MOD_RES (28)..(28): Variable amino acid
CXXXXXCXXXCXXXXXXXXXXCXXXXCXC

SEQ ID NO: 313 - protein, 29 aa, Artificial Sequence
  Description of Artificial Sequence: Synthetic amino acid sequence
  MOD_RES (2)..(6): Variable amino acid
  MOD_RES (8)..(10): Variable amino acid
  MOD_RES (13)..(19): Variable amino acid
  MOD_RES (23)..(25): Variable amino acid
  MOD_RES (28)..(28): Variable amino acid
CXXXXXCXXXCKXXXXXXXGKCXXXKCXC

SEQ ID NO: 314 - protein, 47 aa, Artificial Sequence
  Description of Artificial Sequence: Synthetic amino acid sequence
  MOD_RES (2)..(4): Variable amino acid that may or may not be present
  MOD_RES (5)..(5): Variable amino acid
  MOD_RES (6)..(7): Variable amino acid that may or may not be present
  MOD_RES (8)..(11): Variable amino acid
  MOD_RES (13)..(15): Variable amino acid
  MOD_RES (17)..(18): Variable amino acid
  MOD_RES (19)..(20): Variable amino acid that may or may not be present
  MOD_RES (21)..(22): Variable amino acid
  MOD_RES (24)..(26): Variable amino acid
  MOD_RES (28)..(29): Variable amino acid
  MOD_RES (30)..(30): Variable amino acid that may or may not be present
  MOD_RES (31)..(34): Variable amino acid
  MOD_RES (36)..(40): Variable amino acid
  MOD_RES (41)..(42): Variable amino acid that may or may not be present
  MOD_RES (43)..(44): Variable amino acid
  MOD_RES (46)..(46): Variable amino acid
CXXXXXXXXXXCXXXCXXXXXXCXXXCXXXXXXXCXXXXXXXXXCXC

SEQ ID NO: 315 - protein, 48 aa, Artificial Sequence
  Description of Artificial Sequence: Synthetic amino acid sequence
  MOD_RES (2)..(4): Variable amino acid that may or may not be present
  MOD_RES (6)..(7): Variable amino acid that may or may not be present
  MOD_RES (8)..(11): Variable amino acid
  MOD_RES (13)..(15): Variable amino acid
  MOD_RES (17)..(18): Variable amino acid
  MOD_RES (19)..(20): Variable amino acid that may or may not be present
  MOD_RES (21)..(22): Variable amino acid
  MOD_RES (24)..(26): Variable amino acid
  MOD_RES (28)..(29): Variable amino acid
  MOD_RES (30)..(30): Variable amino acid that may or may not be present
  MOD_RES (31)..(32): Variable amino acid
  MOD_RES (34)..(34): Variable amino acid
  MOD_RES (36)..(40): Variable amino acid
  MOD_RES (41)..(42): Variable amino acid that may or may not be present
  MOD_RES (43)..(44): Variable amino acid
  MOD_RES (46)..(47): May or may not be present
CXXXYXXXXXXCXXXCXXXXXXCXXXCXXXXXGXCXXXXXXXXXCWYC

SEQ ID NO: 316 - protein, 47 aa, Artificial Sequence; identical to SEQ ID NO: 201
  Description of Artificial Sequence: Synthetic amino acid sequence
  MOD_RES (2)..(2): Variable amino acid
  MOD_RES (4)..(19): Variable amino acid
  MOD_RES (20)..(21): Variable amino acid that may or may not be present
  MOD_RES (22)..(25): Variable amino acid
  MOD_RES (27)..(29): Variable amino acid that may or may not be present
  MOD_RES (30)..(35): Variable amino acid
  MOD_RES (37)..(45): Variable amino acid

SEQ ID NO: 317 - protein, 47 aa, Artificial Sequence; identical to SEQ ID NO: 199
  Description of Artificial Sequence: Synthetic amino acid sequence
  MOD_RES (2)..(2): Variable amino acid
  MOD_RES (4)..(7): Variable amino acid
  MOD_RES (9)..(10): Variable amino acid
  MOD_RES (12)..(16): Variable amino acid
  MOD_RES (18)..(19): Variable amino acid
  MOD_RES (20)..(21): Variable amino acid that may or may not be present
  MOD_RES (22)..(25): Variable amino acid
  MOD_RES (27)..(29): Variable amino acid that may or may not be present
  MOD_RES (30)..(32): Variable amino acid
  MOD_RES (34)..(35): Variable amino acid
  MOD_RES (37)..(45): Variable amino acid

SEQ ID NO: 318 - protein, 28 aa, Artificial Sequence
  Description of Artificial Sequence: Synthetic amino acid sequence
  MOD_RES (2)..(3): Variable amino acid
  MOD_RES (5)..(7): Variable amino acid
  MOD_RES (9)..(15): Variable amino acid
  MOD_RES (16)..(17): Variable amino acid that may or may not be present
  MOD_RES (19)..(20): Variable amino acid that may or may not be present
  MOD_RES (21)..(25): Variable amino acid
  MOD_RES (27)..(27): Variable amino acid
CXXCXXXCXXXXXXXXXCXXXXXXXCXC

SEQ ID NO: 319 - protein, 33 aa, Artificial Sequence
  Description of Artificial Sequence: Synthetic amino acid sequence
  MOD_RES (2)..(7): Variable amino acid
  MOD_RES (9)..(15): Variable amino acid
  MOD_RES (18)..(22): Variable amino acid
  MOD_RES (24)..(24): Variable amino acid
  MOD_RES (26)..(30): Variable amino acid
  MOD_RES (32)..(32): Variable amino acid
CXXXXXXCXXXXXXXCCXXXXXCXCXXXXXCXC

SEQ ID NO: 320 - protein, 33 aa, Artificial Sequence
  Description of Artificial Sequence: Synthetic amino acid sequence
  MOD_RES (2)..(7): Variable amino acid
  MOD_RES (9)..(10): Variable amino acid
  MOD_RES (12)..(15): Variable amino acid
  MOD_RES (18)..(18): Variable amino acid
  MOD_RES (20)..(21): Variable amino acid
  MOD_RES (24)..(24): Variable amino acid
  MOD_RES (26)..(28): Variable amino acid
  MOD_RES (30)..(30): Variable amino acid
  MOD_RES (32)..(32): Variable amino acid
CXXXXXXCXXWXXXXCCXGXXYCXCXXXPXCXC

SEQ ID NO: 321 - protein, 32 aa, Artificial Sequence
  Description of Artificial Sequence: Synthetic amino acid sequence
  MOD_RES (2)..(3): Variable amino acid
  MOD_RES (4)..(4): Variable amino acid that may or may not be present
  MOD_RES (5)..(8): Variable amino acid
  MOD_RES (10)..(14): Variable amino acid
  MOD_RES (17)..(19): Variable amino acid
  MOD_RES (20)..(20): Variable amino acid that may or may not be present
  MOD_RES (21)..(21): Variable amino acid
  MOD_RES (23)..(23): Variable amino acid
  MOD_RES (25)..(29): Variable amino acid
  MOD_RES (31)..(31): Variable amino acid
CXXXXXXXCXXXXXCCXXXXXCXCXXXXXCXC

SEQ ID NO: 322 - protein, 32 aa, Artificial Sequence
  Description of Artificial Sequence: Synthetic amino acid sequence
  MOD_RES (2)..(3): Variable amino acid
  MOD_RES (4)..(4): Variable amino acid that may or may not be present
  MOD_RES (6)..(8): Variable amino acid
  MOD_RES (10)..(11): Variable amino acid
  MOD_RES (13)..(14): Variable amino acid
  MOD_RES (17)..(17): Variable amino acid
  MOD_RES (19)..(19): Variable amino acid
  MOD_RES (20)..(20): Variable amino acid that may or may not be present
  MOD_RES (21)..(21): Variable amino acid
  MOD_RES (23)..(23): Variable amino acid
  MOD_RES (25)..(28): Variable amino acid
  MOD_RES (31)..(31): Variable amino acid
CXXXYXXXCXXGXXCCXRXXXCXCXXXXNCXC

SEQ ID NO: 323 - protein, 17 aa, Artificial Sequence
  Description of Artificial Sequence: Synthetic amino acid sequence
  MOD_RES (2)..(4): Variable amino acid
  MOD_RES (6)..(10): Variable amino acid
  MOD_RES (12)..(14): Variable amino acid
  MOD_RES (16)..(16): Variable amino acid
CXXXCXXXXXCXXXCXC

SEQ ID NO: 324 - protein, 33 aa, Artificial Sequence; identical to SEQ ID NO: 278
  Description of Artificial Sequence: Synthetic amino acid sequence
  MOD_RES (2)..(7): Variable amino acid
  MOD_RES (9)..(13): Variable amino acid
  MOD_RES (14)..(14): Variable amino acid that may or may not be present
  MOD_RES (17)..(20): Variable amino acid
  MOD_RES (22)..(24): Variable amino acid
  MOD_RES (25)..(27): Variable amino acid that may or may not be present
  MOD_RES (28)..(28): Variable amino acid
  MOD_RES (29)..(30): Variable amino acid that may or may not be present
  MOD_RES (31)..(32): Variable amino acid

SEQ ID NO: 325 - protein, 23 aa, Artificial Sequence
  Description of Artificial Sequence: Synthetic amino acid sequence
  MOD_RES (3)..(9): Variable amino acid
  MOD_RES (11)..(12): Variable amino acid
  MOD_RES (14)..(14): Variable amino acid
  MOD_RES (16)..(16): Variable amino acid
  MOD_RES (17)..(17): Variable amino acid that may or may not be present
  MOD_RES (18)..(22): Variable amino acid
CCXXXXXXXCXXCXCXXXXXXXC

SEQ ID NO: 326 - protein, 23 aa, Artificial Sequence
  Description of Artificial Sequence: Synthetic amino acid sequence
  MOD_RES (4)..(5): Variable amino acid
  MOD_RES (7)..(9): Variable amino acid
  MOD_RES (14)..(14): Variable amino acid
  MOD_RES (16)..(16): Variable amino acid
  MOD_RES (17)..(17): Variable amino acid that may or may not be present
  MOD_RES (18)..(19): Variable amino acid
  MOD_RES (21)..(22): Variable amino acid
CCGXXPXXXCHPCXCXXXXPXXC

SEQ ID NO: 327 - protein, 31 aa, Artificial Sequence; identical to SEQ ID NO: 212
  Description of Artificial Sequence: Synthetic amino acid sequence
  MOD_RES (2)..(7): Variable amino acid
  MOD_RES (9)..(10): Variable amino acid
  MOD_RES (13)..(13): Variable amino acid
  MOD_RES (16)..(19): Variable amino acid
  MOD_RES (21)..(30): Variable amino acid

SEQ ID NO: 328 - protein, 31 aa, Artificial Sequence
  Description of Artificial Sequence: Synthetic amino acid sequence
  MOD_RES (2)..(2): Variable amino acid
  MOD_RES (4)..(6): Variable amino acid
  MOD_RES (9)..(10): Variable amino acid
  MOD_RES (18)..(19): Variable amino acid
  MOD_RES (21)..(26): Variable amino acid
  MOD_RES (28)..(29): Variable amino acid
CXGXXXPCXXCCPCCPGXXCXXXXXXGXXYC

SEQ ID NO: 329 - protein, 37 aa, Artificial Sequence; identical to SEQ ID NO: 131
  Description of Artificial Sequence: Synthetic amino acid sequence
  MOD_RES (2)..(6): Variable amino acid
  MOD_RES (8)..(15): Variable amino acid
  MOD_RES (17)..(18): Variable amino acid
  MOD_RES (21)..(29): Variable amino acid
  MOD_RES (31)..(34): Variable amino acid
  MOD_RES (36)..(36): Variable amino acid

SEQ ID NO: 330 - protein, 41 aa, Artificial Sequence
  Description of Artificial Sequence: Synthetic amino acid sequence
  MOD_RES (4)..(4): Variable amino acid
  MOD_RES (6)..(6): Variable amino acid
  MOD_RES (8)..(10): Variable amino acid
  MOD_RES (12)..(13): Variable amino acid
  MOD_RES (16)..(16): Variable amino acid
  MOD_RES (18)..(19): Variable amino acid
  MOD_RES (21)..(22): Variable amino acid
  MOD_RES (25)..(27): Variable amino acid
  MOD_RES (29)..(31): Variable amino acid
  MOD_RES (33)..(33): Variable amino acid
  MOD_RES (35)..(38): Variable amino acid
  MOD_RES (40)..(40): Variable amino acid
DRDXCXDXXXCXXYGXYXXCXXCCXXXGXXXGXCXXXXCXC

SEQ ID NO: 331 - protein, 28 aa, Artificial Sequence
  Description of Artificial Sequence: Synthetic amino acid sequence
  MOD_RES (2)..(7): Variable amino acid
  MOD_RES (9)..(13): Variable amino acid
  MOD_RES (16)..(16): Variable amino acid
  MOD_RES (17)..(18): Variable amino acid that may or may not be present
  MOD_RES (19)..(20): Variable amino acid
  MOD_RES (22)..(27): Variable amino acid
CXXXXXXCXXXXXCCXXXXXCXXXXXXC

SEQ ID NO: 332 - protein, 28 aa, Artificial Sequence
  Description of Artificial Sequence: Synthetic amino acid sequence
  MOD_RES (2)..(4): Variable amino acid
  MOD_RES (6)..(7): Variable amino acid
  MOD_RES (9)..(13): Variable amino acid
  MOD_RES (16)..(16): Variable amino acid
  MOD_RES (17)..(18): Variable amino acid that may or may not be present
  MOD_RES (20)..(20): Variable amino acid
  MOD_RES (22)..(24): Variable amino acid
  MOD_RES (26)..(27): Variable amino acid
CXXXGXXCXXXXXCCXXXGXCXXXFXXC

SEQ ID NO: 333 - protein, 37 aa, Artificial Sequence; identical to SEQ ID NO: 126
  Description of Artificial Sequence: Synthetic amino acid sequence
  MOD_RES (2)..(7): Variable amino acid
  MOD_RES (9)..(13): Variable amino acid
  MOD_RES (16)..(18): Variable amino acid
  MOD_RES (20)..(25): Variable amino acid
  MOD_RES (27)..(32): Variable amino acid
  MOD_RES (34)..(36): Variable amino acid

SEQ ID NO: 334 - protein, 37 aa, Artificial Sequence
  Description of Artificial Sequence: Synthetic amino acid sequence
  MOD_RES (2)..(6): Variable amino acid
  MOD_RES (9)..(9): Variable amino acid
  MOD_RES (11)..(13): Variable amino acid
  MOD_RES (16)..(16): Variable amino acid
  MOD_RES (18)..(18): Variable amino acid
  MOD_RES (20)..(23): Variable amino acid
  MOD_RES (25)..(25): Variable amino acid
  MOD_RES (27)..(32): Variable amino acid
  MOD_RES (36)..(36): Variable amino acid
CXXXXXPCXNXXXCCXGXCXXXXWXCXXXXXXCSKXC

SEQ ID NO: 335 - protein, 26 aa, Artificial Sequence
  Description of Artificial Sequence: Synthetic amino acid sequence
  MOD_RES (2)..(7): Variable amino acid
  MOD_RES (9)..(11): Variable amino acid
  MOD_RES (14)..(17): Variable amino acid
  MOD_RES (19)..(25): Variable amino acid
CXXXXXXCXXXCCXXXXCXXXXXXXC

SEQ ID NO: 336 - protein, 26 aa, Artificial Sequence
  Description of Artificial Sequence: Synthetic amino acid sequence
  MOD_RES (2)..(2): Variable amino acid
  MOD_RES (4)..(7): Variable amino acid
  MOD_RES (11)..(11): Variable amino acid
  MOD_RES (14)..(14): Variable amino acid
  MOD_RES (16)..(17): Variable amino acid
  MOD_RES (19)..(20): Variable amino acid
  MOD_RES (22)..(25): Variable amino acid
CXGXXXXCPPXCCXGXXCXXGXXXXC

SEQ ID NO: 337 - protein, 29 aa, Artificial Sequence
  Description of Artificial Sequence: Synthetic amino acid sequence
  MOD_RES (2)..(7): Variable amino acid
  MOD_RES (9)..(14): Variable amino acid
  MOD_RES (17)..(21): Variable amino acid
  MOD_RES (23)..(28): Variable amino acid
CXXXXXXCXXXXXXCCXXXXXCXXXXXXC

SEQ ID NO: 338 - protein, 30 aa, Artificial Sequence
  Description of Artificial Sequence: Synthetic amino acid sequence
  MOD_RES (2)..(4): Variable amino acid
  MOD_RES (6)..(8): Variable amino acid
  MOD_RES (10)..(10): Variable amino acid
  MOD_RES (12)..(13): Variable amino acid
  MOD_RES (15)..(15): Variable amino acid
  MOD_RES (18)..(22): Variable amino acid
  MOD_RES (24)..(25): Variable amino acid
  MOD_RES (29)..(29): Variable amino acid
CXXXGXXXCXGXXKXCCXXXXXCXXYANXC

SEQ ID NO: 339 - protein, 37 aa, Artificial Sequence; identical to SEQ ID NO: 34
  Description of Artificial Sequence: Synthetic amino acid sequence
  MOD_RES (2)..(3): Variable amino acid
  MOD_RES (4)..(4): Variable amino acid that may or may not be present
  MOD_RES (5)..(5): Variable amino acid
  MOD_RES (7)..(16): Variable amino acid
  MOD_RES (18)..(18): Variable amino acid
  MOD_RES (20)..(22): Variable amino acid
  MOD_RES (24)..(28): Variable amino acid
  MOD_RES (31)..(36): Variable amino acid

SEQ ID NO: 340 - protein, 35 aa, Artificial Sequence
  Description of Artificial Sequence: Synthetic amino acid sequence
  MOD_RES (2)..(3): Variable amino acid
  MOD_RES (4)..(4): Variable amino acid that may or may not be present
  MOD_RES (7)..(14): Variable amino acid
  MOD_RES (16)..(16): Variable amino acid
  MOD_RES (18)..(20): Variable amino acid
  MOD_RES (22)..(26): Variable amino acid
  MOD_RES (29)..(29): Variable amino acid
  MOD_RES (31)..(34): Variable amino acid
CXXXRCXXXXXXXXCXCXXXCXXXXXCCXDXXXXC

SEQ ID NO: 341 - protein, 37 aa, Artificial Sequence; identical to SEQ ID NO: 35
  Description of Artificial Sequence: Synthetic amino acid sequence
  MOD_RES (2)..(3): Variable amino acid
  MOD_RES (4)..(4): Variable amino acid that may or may not be present
  MOD_RES (7)..(7): Variable amino acid
  MOD_RES (9)..(16): Variable amino acid
  MOD_RES (18)..(18): Variable amino acid
  MOD_RES (20)..(22): Variable amino acid
  MOD_RES (24)..(28): Variable amino acid
  MOD_RES (31)..(31): Variable amino acid
  MOD_RES (33)..(33): Tyr or Phe
  MOD_RES (34)..(36): Variable amino acid

SEQ ID NO: 342 - protein, 61 aa, Artificial Sequence
  Description of Artificial Sequence: Synthetic amino acid sequence
  MOD_RES (2)..(11): Variable amino acid
  MOD_RES (12)..(14): Variable amino acid that may or may not be present
  MOD_RES (16)..(19): Variable amino acid
  MOD_RES (20)..(21): Variable amino acid that may or may not be present
  MOD_RES (23)..(34): Variable amino acid
  MOD_RES (35)..(35): Variable amino acid that may or may not be present
  MOD_RES (36)..(39): Variable amino acid
  MOD_RES (41)..(41): Variable amino acid
  MOD_RES (42)..(43): Variable amino acid that may or may not be present
  MOD_RES (45)..(54): Variable amino acid
  MOD_RES (57)..(60): Variable amino acid
CXXXXXXXXXXXXXCXXXXXXCXXXXXXXXXXXXXXXXXCXXXCXXXXXXXXXXCCXXXXC

SEQ ID NO: 343 - protein, 63 aa, Artificial Sequence
  Description of Artificial Sequence: Synthetic amino acid sequence
  MOD_RES (3)..(11): Variable amino acid
  MOD_RES (12)..(14): Variable amino acid that may or may not be present
  MOD_RES (17)..(17): Variable amino acid
  MOD_RES (19)..(19): Variable amino acid
  MOD_RES (20)..(21): Variable amino acid that may or may not be present
  MOD_RES (24)..(24): Variable amino acid
  MOD_RES (26)..(26): Variable amino acid
  MOD_RES (27)..(28): May or may not be present
  MOD_RES (29)..(34): Variable amino acid
  MOD_RES (35)..(35): Variable amino acid that may or may not be present
  MOD_RES (36)..(39): Variable amino acid
  MOD_RES (42)..(42): Variable amino acid
  MOD_RES (43)..(43): Variable amino acid that may or may not be present
  MOD_RES (44)..(44): May or may not be present
  MOD_RES (47)..(55): Variable amino acid
  MOD_RES (58)..(58): Variable amino acid
  MOD_RES (59)..(60): May or may not be present
  MOD_RES (62)..(62): Variable amino acid
CYXXXXXXXXXXXXCPXGXXXCYXKXWFXXXXXXXXXXXGCXXTCPXXXXXXXXXCCXTSDXC

SEQ ID NO: 344 - protein, 37 aa, Artificial Sequence; identical to SEQ ID NO: 283
  Description of Artificial Sequence: Synthetic amino acid sequence
  MOD_RES (2)..(9): Variable amino acid
  MOD_RES (11)..(14): Variable amino acid
  MOD_RES (17)..(21): Variable amino acid
  MOD_RES (23)..(28): Variable amino acid
  MOD_RES (30)..(32): Variable amino acid
  MOD_RES (34)..(36): Variable amino acid

SEQ ID NO: 345 - protein, 37 aa, Artificial Sequence
  Description of Artificial Sequence: Synthetic amino acid sequence
  MOD_RES (3)..(3): Variable amino acid
  MOD_RES (5)..(9): Variable amino acid
  MOD_RES (11)..(14): Variable amino acid
  MOD_RES (18)..(19): Variable amino acid
  MOD_RES (21)..(21): Variable amino acid
  MOD_RES (24)..(27): Variable amino acid
  MOD_RES (30)..(32): Variable amino acid
  MOD_RES (34)..(36): Variable amino acid
CGXQXXXXXCXXXXCCSXXGXCGXXXXYCXXXCXXXC

SEQ ID NO: 346 - protein, 55 aa, Artificial Sequence
  Description of Artificial Sequence: Synthetic amino acid sequence
  MOD_RES (2)..(4): Variable amino acid
  MOD_RES (5)..(5): Variable amino acid that may or may not be present
  MOD_RES (6)..(12): Variable amino acid
  MOD_RES (13)..(13): Variable amino acid that may or may not be present
  MOD_RES (14)..(16): Variable amino acid
  MOD_RES (18)..(18): Variable amino acid that may or may not be present
  MOD_RES (19)..(23): Variable amino acid
  MOD_RES (25)..(33): Variable amino acid
  MOD_RES (35)..(46): Variable amino acid
  MOD_RES (48)..(55): Variable amino acid
CXXXXXXXXXXXXXXXCXXXXXXCXXXXXXXXXCXXXXXXXXXXXXCXXXXXXXX

SEQ ID NO: 347 - protein, 56 aa, Artificial Sequence
  Description of Artificial Sequence: Synthetic amino acid sequence
  MOD_RES (2)..(4): Variable amino acid
  MOD_RES (5)..(5): Variable amino acid that may or may not be present
  MOD_RES (6)..(7): Variable amino acid
  MOD_RES (9)..(12): Variable amino acid
  MOD_RES (13)..(13): Variable amino acid that may or may not be present
  MOD_RES (14)..(16): Variable amino acid
  MOD_RES (18)..(18): Variable amino acid that may or may not be present
  MOD_RES (19)..(20): Variable amino acid
  MOD_RES (21)..(21): Tyr or Phe
  MOD_RES (22)..(23): Variable amino acid
  MOD_RES (25)..(33): Variable amino acid
  MOD_RES (35)..(36): Variable amino acid
  MOD_RES (38)..(39): Variable amino acid
  MOD_RES (41)..(46): Variable amino acid
  MOD_RES (48)..(55): Variable amino acid
CXXXXXXGXXXXXXXXCXXXXXXCXXXXXXXXXCXXGXXFXXXXXXCXXXXXXXXC

SEQ ID NO: 348 - protein, 68 aa, Artificial Sequence; identical to SEQ ID NO: 46
  Description of Artificial Sequence: Synthetic amino acid sequence
  MOD_RES (2)..(9): Variable amino acid
  MOD_RES (11)..(13): Variable amino acid
  MOD_RES (15)..(17): Variable amino acid
  MOD_RES (19)..(22): Variable amino acid
  MOD_RES (23)..(27): Variable amino acid that may or may not be present
  MOD_RES (28)..(30): Variable amino acid
  MOD_RES (32)..(32): Variable amino acid
  MOD_RES (33)..(39): Variable amino acid that may or may not be present
  MOD_RES (40)..(41): Variable amino acid
  MOD_RES (43)..(45): Variable amino acid
  MOD_RES (46)..(46): Variable amino acid that may or may not be present
  MOD_RES (48)..(48): Variable amino acid
  MOD_RES (50)..(58): Variable amino acid
  MOD_RES (59)..(60): Variable amino acid that may or may not be present
  MOD_RES (61)..(61): Variable amino acid
  MOD_RES (63)..(67): Variable amino acid

SEQ ID NO: 349 - protein, 48 aa, Artificial Sequence
  Description of Artificial Sequence: Synthetic amino acid sequence
  MOD_RES (2)..(4): Variable amino acid
  MOD_RES (6)..(13): Variable amino acid
  MOD_RES (15)..(20): Variable amino acid
  MOD_RES (21)..(21): Variable amino acid that may or may not be present
  MOD_RES (22)..(26): Variable amino acid
  MOD_RES (28)..(29): Variable amino acid
  MOD_RES (32)..(36): Variable amino acid
  MOD_RES (38)..(47): Variable amino acid
CXXXCXXXXXXXXCXXXXXXXXXXXXCXXCCXXXXXCXXXXXXXXXXC

SEQ ID NO: 350 - protein, 48 aa, Artificial Sequence
  Description of Artificial Sequence: Synthetic amino acid sequence
  MOD_RES (2)..(4): Variable amino acid
  MOD_RES (6)..(13): Variable amino acid
  MOD_RES (16)..(20): Variable amino acid
  MOD_RES (21)..(21): Variable amino acid that may or may not be present
  MOD_RES (22)..(26): Variable amino acid
  MOD_RES (28)..(29): Variable amino acid
  MOD_RES (32)..(35): Variable amino acid
  MOD_RES (38)..(43): Variable amino acid
  MOD_RES (45)..(47): Variable amino acid
CXXXCXXXXXXXXCPXXXXXXXXXXXCXXCCXXXXGCXXXXXXGXXXC

SEQ ID NO: 351 - protein, 46 aa, Artificial Sequence
  Description of Artificial Sequence: Synthetic amino acid sequence
  MOD_RES (2)..(10): Variable amino acid
  MOD_RES (12)..(16): Variable amino acid
  MOD_RES (18)..(20): Variable amino acid
  MOD_RES (22)..(27): Variable amino acid
  MOD_RES (28)..(28): Variable amino acid that may or may not be present
  MOD_RES (29)..(31): Variable amino acid
  MOD_RES (33)..(34): Variable amino acid
  MOD_RES (35)..(35): Variable amino acid that may or may not be present
  MOD_RES (36)..(39): Variable amino acid
  MOD_RES (41)..(41): Variable amino acid
  MOD_RES (43)..(45): Variable amino acid
CXXXXXXXXXCXXXXXCXXXCXXXXXXXXXXCXXXXXXXCXCXXXC

SEQ ID NO: 352 - protein, 47 aa, Artificial Sequence
  Description of Artificial Sequence: Synthetic amino acid sequence
  MOD_RES (2)..(4): Variable amino acid
  MOD_RES (6)..(7): Variable amino acid
  MOD_RES (9)..(9): Variable amino acid
  MOD_RES (11)..(11): Variable amino acid
  MOD_RES (13)..(17): Variable amino acid
  MOD_RES (19)..(21): Variable amino acid
  MOD_RES (23)..(28): Variable amino acid
  MOD_RES (29)..(29): Variable amino acid that may or may not be present
  MOD_RES (30)..(30): Variable amino acid
  MOD_RES (32)..(32): Variable amino acid
  MOD_RES (34)..(35): Variable amino acid
  MOD_RES (36)..(36): Variable amino acid that may or may not be present
  MOD_RES (37)..(40): Variable amino acid
  MOD_RES (42)..(42): Variable amino acid
  MOD_RES (44)..(46): Variable amino acid
CXXXSXXFXGXCXXXXXCXXXCXXXXXXXXGXCXXXXXXXCXCXXXC

SEQ ID NO: 353 - protein, 24 aa, Artificial Sequence
  Description of Artificial Sequence: Synthetic amino acid sequence
  MOD_RES (2)..(3): Variable amino acid that may or may not be present
  MOD_RES (4)..(8): Variable amino acid
  MOD_RES (11)..(12): Variable amino acid
  MOD_RES (13)..(14): Variable amino acid that may or may not be present
  MOD_RES (15)..(15): Variable amino acid
  MOD_RES (17)..(17): Variable amino acid
  MOD_RES (18)..(20): Variable amino acid that may or may not be present
  MOD_RES (21)..(22): Variable amino acid
CXXXXXXXCCXXXXXCXXXXXXCC

SEQ ID NO: 354 - protein, 19 aa, Artificial Sequence
  Description of Artificial Sequence: Synthetic amino acid sequence
  MOD_RES (3)..(7): Variable amino acid
  MOD_RES (9)..(12): Variable amino acid
  MOD_RES (14)..(17): Variable amino acid
CCXXXXXCXXXXCXXXXCC

SEQ ID NO: 355 - protein, 19 aa, Artificial Sequence
  Description of Artificial Sequence: Synthetic amino acid sequence
  MOD_RES (3)..(4): Variable amino acid
  MOD_RES (6)..(7): Variable amino acid
  MOD_RES (9)..(12): Variable amino acid
  MOD_RES (14)..(14): Variable amino acid
  MOD_RES (16)..(17): Variable amino acid
CCXXPXXCXXXXCXPXXCC

SEQ ID NO: 356 - protein, 49 aa, Artificial Sequence
  Description of Artificial Sequence: Synthetic amino acid sequence
  MOD_RES (2)..(5): Variable amino acid
  MOD_RES (7)..(11): Variable amino acid
  MOD_RES (13)..(18): Variable amino acid
  MOD_RES (20)..(20): Variable amino acid
  MOD_RES (22)..(25): Variable amino acid
  MOD_RES (27)..(27): Variable amino acid that may or may not be present
  MOD_RES (28)..(30): Variable amino acid
  MOD_RES (32)..(40): Variable amino acid
  MOD_RES (42)..(42): Variable amino acid
  MOD_RES (43)..(45): Variable amino acid that may or may not be present
  MOD_RES (46)..(46): Variable amino acid
  MOD_RES (48)..(48): Variable amino acid
CXXXXCXXXXXCXXXXXXCXCXXXXCXXXXCXXXXXXXXXCXXXXXCXC

SEQ ID NO: 357 - protein, 50 aa, Artificial Sequence
  Description of Artificial Sequence: Synthetic amino acid sequence
  MOD_RES (2)..(5): Variable amino acid
  MOD_RES (7)..(11): Variable amino acid
  MOD_RES (13)..(18): Variable amino acid
  MOD_RES (20)..(20): Variable amino acid
  MOD_RES (22)..(25): Variable amino acid
  MOD_RES (27)..(27): Variable amino acid that may or may not be present
  MOD_RES (28)..(30): Variable amino acid
  MOD_RES (32)..(33): Variable amino acid
  MOD_RES (35)..(37): Variable amino acid
  MOD_RES (39)..(40): Variable amino acid
  MOD_RES (43)..(43): Variable amino acid
  MOD_RES (44)..(46): Variable amino acid that may or may not be present
  MOD_RES (47)..(47): Variable amino acid
  MOD_RES (49)..(49): Variable amino acid
CXXXXCXXXXXCXXXXXXCXCXXXXCXXXXCXXGXXXDXXGCXXXXXCXC

SEQ ID NO: 358 - protein, 50 aa, Artificial Sequence
  Description of Artificial Sequence: Synthetic amino acid sequence
  MOD_RES (2)..(5): Variable amino acid
  MOD_RES (7)..(11): Variable amino acid
  MOD_RES (13)..(18): Variable amino acid
  MOD_RES (20)..(20): Variable amino acid
  MOD_RES (22)..(25): Variable amino acid
  MOD_RES (27)..(27): Variable amino acid that may or may not be present
  MOD_RES (28)..(30): Variable amino acid
  MOD_RES (35)..(37): Variable amino acid
  MOD_RES (39)..(40): Variable amino acid
  MOD_RES (43)..(43): Variable amino acid
  MOD_RES (44)..(46): Variable amino acid that may or may not be present
  MOD_RES (47)..(47): Variable amino acid
  MOD_RES (49)..(49): Variable amino acid
CXXXXCXXXXXCXXXXXXCXCXXXXCXXXXCPYGXXXDXXGCXXXXXCXC

SEQ ID NO: 359 - protein, 29 aa, Artificial Sequence
  Description of Artificial Sequence: Synthetic amino acid sequence
  MOD_RES (2)..(5): Variable amino acid
  MOD_RES (7)..(7): Variable amino acid that may or may not be present
  MOD_RES (8)..(10): Variable amino acid
  MOD_RES (12)..(20): Variable amino acid
  MOD_RES (22)..(22): Variable amino acid
  MOD_RES (23)..(25): Variable amino acid that may or may not be present
  MOD_RES (26)..(26): Variable amino acid
  MOD_RES (28)..(28): Variable amino acid
CXXXXCXXXXCXXXXXXXXXCXXXXXCXC

SEQ ID NO: 360 - protein, 30 aa, Artificial Sequence; identical to SEQ ID NO: 63
  Description of Artificial Sequence: Synthetic amino acid sequence
  MOD_RES (2)..(5): Variable amino acid
  MOD_RES (7)..(7): Variable amino acid that may or may not be present
  MOD_RES (8)..(10): Variable amino acid
  MOD_RES (12)..(13): Variable amino acid
  MOD_RES (15)..(17): Variable amino acid
  MOD_RES (19)..(20): Variable amino acid
  MOD_RES (23)..(23): Variable amino acid
  MOD_RES (24)..(26): Variable amino acid that may or may not be present
  MOD_RES (27)..(27): Variable amino acid
  MOD_RES (29)..(29): Variable amino acid

SEQ ID NO: 361 - protein, 30 aa, Artificial Sequence
  Description of Artificial Sequence: Synthetic amino acid sequence
  MOD_RES (2)..(5): Variable amino acid
  MOD_RES (7)..(7): Variable amino acid that may or may not be present
  MOD_RES (8)..(10): Variable amino acid
  MOD_RES (15)..(17): Variable amino acid
  MOD_RES (19)..(20): Variable amino acid
  MOD_RES (23)..(23): Variable amino acid
  MOD_RES (24)..(26): Variable amino acid that may or may not be present
  MOD_RES (27)..(27): Variable amino acid
  MOD_RES (29)..(29): Variable amino acid
CXXXXCXXXXCPYGXXXDXXGCXXXXXCXC

SEQ ID NO: 362 - protein, 42 aa, Artificial Sequence
  Description of Artificial Sequence: Synthetic amino acid sequence
  MOD_RES (2)..(6): Variable amino acid
  MOD_RES (8)..(13): Variable amino acid
  MOD_RES (16)..(17): Variable amino acid
  MOD_RES (19)..(20): Variable amino acid
  MOD_RES (22)..(22): Variable amino acid
  MOD_RES (24)..(29): Variable amino acid
  MOD_RES (31)..(31): Variable amino acid
  MOD_RES (33)..(41): Variable amino acid
CXXXXXCXXXXXXCCXXCXXCXCXXXXXXCXCXXXXXXXXXC

SEQ ID NO: 363 - protein, 42 aa, Artificial Sequence
  Description of Artificial Sequence: Synthetic amino acid sequence
  MOD_RES (2)..(5): Variable amino acid
  MOD_RES (8)..(13): Variable amino acid
  MOD_RES (19)..(20): Variable amino acid
  MOD_RES (22)..(22): Variable amino acid
  MOD_RES (27)..(29): Variable amino acid
  MOD_RES (31)..(31): Variable amino acid
  MOD_RES (34)..(41): Variable amino acid
CXXXXSCXXXXXXCCDPCXXCXCRFFXXXCXCRXXXXXXXXC

SEQ ID NO: 364 - protein, 42 aa, Artificial Sequence
  Description of Artificial Sequence: Synthetic amino acid sequence
  MOD_RES (2)..(5): Variable amino acid
  MOD_RES (8)..(8): Variable amino acid
  MOD_RES (10)..(12): Variable amino acid
  MOD_RES (20)..(20): Variable amino acid
  MOD_RES (22)..(22): Variable amino acid
  MOD_RES (27)..(29): Variable amino acid
  MOD_RES (31)..(31): Variable amino acid
  MOD_RES (34)..(34): Variable amino acid
  MOD_RES (36)..(41): Variable amino acid
CXXXXSCXGXXXPCCDPCAXCXCRFFXXXCXCRXLXXXXXXC

SEQ ID NO: 365 - protein, 33 aa, Artificial Sequence
  Description of Artificial Sequence: Synthetic amino acid sequence
  MOD_RES (2)..(6): Variable amino acid
  MOD_RES (8)..(13): Variable amino acid
  MOD_RES (16)..(20): Variable amino acid
  MOD_RES (22)..(22): Variable amino acid
  MOD_RES (24)..(29): Variable amino acid
  MOD_RES (31)..(31): Variable amino acid
  MOD_RES (33)..(33): Variable amino acid
CXXXXXCXXXXXXCCXXXXXCXCXXXXXXCXCX

SEQ ID NO: 366 - protein, 35 aa, Artificial Sequence
  Description of Artificial Sequence: Synthetic amino acid sequence
  MOD_RES (2)..(6): Variable amino acid
  MOD_RES (8)..(13): Variable amino acid
  MOD_RES (18)..(20): Variable amino acid
  MOD_RES (22)..(22): Variable amino acid
  MOD_RES (27)..(29): Variable amino acid
  MOD_RES (31)..(31): Variable amino acid
  MOD_RES (34)..(35): Variable amino acid
CXXXXXCXXXXXXCCDPXXXCXCRFFXXXCXCRXX

SEQ ID NO: 367 - protein, 35 aa, Artificial Sequence
  Description of Artificial Sequence: Synthetic amino acid sequence
  MOD_RES (2)..(2): Variable amino acid
  MOD_RES (4)..(6): Variable amino acid
  MOD_RES (8)..(13): Variable amino acid
  MOD_RES (19)..(20): Variable amino acid
  MOD_RES (27)..(29): Variable amino acid
  MOD_RES (31)..(31): Variable amino acid
  MOD_RES (34)..(35): Variable amino acid
CXGXXXCXXXXXXCCDPAXXCYCRFFXXXCXCRXX

SEQ ID NO: 368 - protein, 30 aa, Artificial Sequence
  Description of Artificial Sequence: Synthetic amino acid sequence
  MOD_RES (2)..(10): Variable amino acid
  MOD_RES (12)..(13): Variable amino acid
  MOD_RES (15)..(15): Variable amino acid
  MOD_RES (17)..(20): Variable amino acid
  MOD_RES (21)..(21): Variable amino acid that may or may not be present
  MOD_RES (22)..(24): Variable amino acid
  MOD_RES (26)..(29): Variable amino acid
CXXXXXXXXXCXXCXCXXXXXXXXCXXXXC

SEQ ID NO: 369 - protein, 30 aa, Artificial Sequence
  Description of Artificial Sequence: Synthetic amino acid sequence
  MOD_RES (2)..(2): Variable amino acid
  MOD_RES (5)..(7): Variable amino acid
  MOD_RES (9)..(10): Variable amino acid
  MOD_RES (13)..(13): Variable amino acid
  MOD_RES (15)..(15): Variable amino acid
  MOD_RES (17)..(20): Variable amino acid
  MOD_RES (21)..(21): Variable amino acid that may or may not be present
  MOD_RES (22)..(24): Variable amino acid
  MOD_RES (27)..(29): Variable amino acid
CXPGXXXKXXCNXCXCXXXXXXXXCTXXXC

SEQ ID NO: 370 - protein, 42 aa, Artificial Sequence
  Description of Artificial Sequence: Synthetic amino acid sequence
  MOD_RES (2)..(2): Variable amino acid
  MOD_RES (3)..(5): Variable amino acid that may or may not be present
  MOD_RES (6)..(8): Variable amino acid
  MOD_RES (9)..(9): Variable amino acid that may or may not be present
  MOD_RES (10)..(11): Variable amino acid
  MOD_RES (13)..(18): Variable amino acid
  MOD_RES (19)..(20): Variable amino acid that may or may not be present
  MOD_RES (22)..(25): Variable amino acid
  MOD_RES (26)..(26): Variable amino acid that may or may not be present
  MOD_RES (27)..(34): Variable amino acid
  MOD_RES (36)..(38): Variable amino acid
  MOD_RES (40)..(41): Variable amino acid
CXXXXXXXXXXCXXXXXXXXCXXXXXXXXXXXXXCXXXCXXC

SEQ ID NO: 371 - protein, 41 aa, Artificial Sequence
  Description of Artificial Sequence: Synthetic amino acid sequence
  MOD_RES (2)..(2): Variable amino acid
  MOD_RES (3)..(3): May or may not be present
  MOD_RES (4)..(5): Variable amino acid that may or may not be present
  MOD_RES (7)..(8): Variable amino acid
  MOD_RES (9)..(9): Variable amino acid that may or may not be present
  MOD_RES (10)..(11): Variable amino acid
  MOD_RES (13)..(18): Variable amino acid
  MOD_RES (19)..(20): Variable amino acid that may or may not be present
  MOD_RES (22)..(25): Variable amino acid
  MOD_RES (26)..(26): Variable amino acid that may or may not be present
  MOD_RES (27)..(33): Variable amino acid
  MOD_RES (35)..(36): Variable amino acid
  MOD_RES (39)..(40): Variable amino acid
CXDXXDXXXXXCXXXXXXXXCXXXXXXXXXXXXCXXTCXXC

SEQ ID NO: 372 - protein, 44 aa, Artificial Sequence
  Description of Artificial Sequence: Synthetic amino acid sequence
  MOD_RES (2)..(2): Variable amino acid
  MOD_RES (3)..(8): Variable amino acid that may or may not be present
  MOD_RES (10)..(11): Variable amino acid
  MOD_RES (12)..(12): Variable amino acid that may or may not be present
  MOD_RES (13)..(15): Variable amino acid
  MOD_RES (17)..(20): Variable amino acid
  MOD_RES (21)..(28): Variable amino acid that may or may not be present
  MOD_RES (30)..(30): Variable amino acid
  MOD_RES (32)..(34): Variable amino acid
  MOD_RES (35)..(38): Variable amino acid that may or may not be present
  MOD_RES (39)..(43): Variable amino acid
CXXXXXXXCXXXXXXCXXXXXXXXXXXXCXCXXXXXXXXXXXXC

SEQ ID NO: 373 - protein, 44 aa, Artificial Sequence
  Description of Artificial Sequence: Synthetic amino acid sequence
  MOD_RES (2)..(2): Variable amino acid
  MOD_RES (3)..(8): Variable amino acid that may or may not be present
  MOD_RES (10)..(11): Variable amino acid
  MOD_RES (12)..(12): Variable amino acid that may or may not be present
  MOD_RES (13)..(13): Variable amino acid
  MOD_RES (15)..(15): Variable amino acid
  MOD_RES (17)..(20): Variable amino acid
  MOD_RES (21)..(28): Variable amino acid that may or may not be present
  MOD_RES (30)..(30): Variable amino acid
  MOD_RES (32)..(34): Variable amino acid
  MOD_RES (35)..(38): Variable amino acid that may or may not be present
  MOD_RES (39)..(40): Variable amino acid
  MOD_RES (42)..(43): Variable amino acid
CXXXXXXXCXXXXGXCXXXXXXXXXXXXCXCXXXXXXXXXGXXC

SEQ ID NO: 374 - protein, 39 aa, Artificial Sequence
  Description of Artificial Sequence: Synthetic amino acid sequence
  MOD_RES (2)..(6): Variable amino acid
  MOD_RES (8)..(12): Variable amino acid
  MOD_RES (14)..(18): Variable amino acid
  MOD_RES (19)..(20): Variable amino acid that may or may not be present
  MOD_RES (21)..(23): Variable amino acid
  MOD_RES (25)..(25): Variable amino acid
  MOD_RES (27)..(29): Variable amino acid
  MOD_RES (30)..(33): Variable amino acid that may or may not be present
  MOD_RES (34)..(38): Variable amino acid
CXXXXXCXXXXXCXXXXXXXXXXCXCXXXXXXXXXXXXC

SEQ ID NO: 375 - protein, 39 aa, Artificial Sequence
  Description of Artificial Sequence: Synthetic amino acid sequence
  MOD_RES (2)..(6): Variable amino acid
  MOD_RES (8)..(10): Variable amino acid
  MOD_RES (12)..(12): Variable amino acid
  MOD_RES (14)..(18): Variable amino acid
  MOD_RES (19)..(20): Variable amino acid that may or may not be present
  MOD_RES (21)..(23): Variable amino acid
  MOD_RES (25)..(25): Variable amino acid
  MOD_RES (27)..(28): Variable amino acid
  MOD_RES (30)..(33): Variable amino acid that may or may not be present
  MOD_RES (34)..(35): Variable amino acid
  MOD_RES (37)..(38): Variable amino acid
CXXXXXCXXXGXCXXXXXXXXXXCXCXXGXXXXXXGXXC

SEQ ID NO: 376 - protein, 59 aa, Artificial Sequence
  Description of Artificial Sequence: Synthetic amino acid sequence
  MOD_RES (2)..(2): Variable amino acid
  MOD_RES (4)..(11): Variable amino acid
  MOD_RES (12)..(13): Variable amino acid that may or may not be present
  MOD_RES (15)..(23): Variable amino acid
  MOD_RES (24)..(27): Variable amino acid that may or may not be present
  MOD_RES (29)..(30): Variable amino acid
  MOD_RES (32)..(39): Variable amino acid
  MOD_RES (41)..(42): Variable amino acid
  MOD_RES (44)..(53): Variable amino acid
  MOD_RES (54)..(58): Variable amino acid that may or may not be present
CXCXXXXXXXXXXCXXXXXXXXXXXXXCXXCXXXXXXXXCXXCXXXXXXXXXXXXXXXC

SEQ ID NO: 377 - protein, 60 aa, Artificial Sequence
  Description of Artificial Sequence: Synthetic amino acid sequence
  MOD_RES (2)..(2): Variable amino acid
  MOD_RES (4)..(11): Variable amino acid
  MOD_RES (12)..(13): Variable amino acid that may or may not be present
  MOD_RES (15)..(23): Variable amino acid
  MOD_RES (24)..(25): Variable amino acid that may or may not be present
  MOD_RES (26)..(26): May or may not be present
  MOD_RES (27)..(27): Variable amino acid that may or may not be present
  MOD_RES (29)..(30): Variable amino acid
  MOD_RES (32)..(36): Variable amino acid
  MOD_RES (38)..(39): Variable amino acid
  MOD_RES (41)..(42): May or may not be present
  MOD_RES (43)..(43): Variable amino acid
  MOD_RES (45)..(54): Variable amino acid
  MOD_RES (55)..(59): Variable amino acid that may or may not be present
CXCXXXXXXXXXXCXXXXXXXXXXXGXCXXCXXXXXGXXCDEXCXXXXXXXXXXXXXXXC

SEQ ID NO: 378 - protein, 50 aa, Artificial Sequence
  Description of Artificial Sequence: Synthetic amino acid sequence
  MOD_RES (2)..(8): Variable amino acid
  MOD_RES (10)..(15): Variable amino acid
  MOD_RES (16)..(17): Variable amino acid that may or may not be present
  MOD_RES (19)..(25): Variable amino acid
  MOD_RES (27)..(27): Variable amino acid
  MOD_RES (28)..(31): Variable amino acid that may or may not be present
  MOD_RES (33)..(42): Variable amino acid
  MOD_RES (43)..(49): Variable amino acid that may or may not be present
CXXXXXXXCXXXXXXXXCXXXXXXXCXXXXXCXXXXXXXXXXXXXXXXXC

SEQ ID NO: 379 - protein, 53 aa, Artificial Sequence
  Description of Artificial Sequence: Synthetic amino acid sequence
  MOD_RES (2)..(8): Variable amino acid
  MOD_RES (10)..(15): Variable amino acid
  MOD_RES (16)..(17): Variable amino acid that may or may not be present
  MOD_RES (19)..(19): Variable amino acid
  MOD_RES (21)..(22): Variable amino acid
  MOD_RES (24)..(24): Variable amino acid
  MOD_RES (25)..(26): May or may not be present
  MOD_RES (27)..(27): Variable amino acid
  MOD_RES (29)..(29): Variable amino acid
  MOD_RES (30)..(33): Variable amino acid that may or may not be present
  MOD_RES (35)..(36): Variable amino acid
  MOD_RES (37)..(38): May or may not be present
  MOD_RES (39)..(45): Variable amino acid
  MOD_RES (46)..(52): Variable amino acid that may or may not be present
CXXXXXXXCXXXXXXXXCXNXXGXFYXCXXXXXCXXGYXXXXXXXXXXXXXXC

SEQ ID NO: 380 - protein, 40 aa, Artificial Sequence; identical to SEQ ID NO: 85
  Description of Artificial Sequence: Synthetic amino acid sequence
  MOD_RES (2)..(17): Variable amino acid
  MOD_RES (18)..(21): Variable amino acid that may or may not be present
  MOD_RES (23)..(23): Variable amino acid
  MOD_RES (25)..(26): Variable amino acid
  MOD_RES (28)..(32): Variable amino acid
  MOD_RES (34)..(39): Variable amino acid

SEQ ID NO: 381 - protein, 29 aa, Artificial Sequence
  Description of Artificial Sequence: Synthetic amino acid sequence
  MOD_RES (2)..(2): Variable amino acid
  MOD_RES (4)..(7): Variable amino acid
  MOD_RES (9)..(17): Variable amino acid
  MOD_RES (19)..(27): Variable amino acid
CXCXXXXCXXXXXXXXXCXXXXXXXXXCC

SEQ ID NO: 382 - protein, 29 aa, Artificial Sequence
  Description of Artificial Sequence: Synthetic amino acid sequence
  MOD_RES (2)..(2): Variable amino acid
  MOD_RES (5)..(7): Variable amino acid
  MOD_RES (9)..(11): Variable amino acid
  MOD_RES (14)..(15): Variable amino acid
  MOD_RES (17)..(17): Variable amino acid
  MOD_RES (19)..(21): Variable amino acid
  MOD_RES (23)..(27): Variable amino acid
CXCRXXXCXXXERXXGXCXXXGXXXXXCC

SEQ ID NO: 383 - protein, 25 aa, Artificial Sequence
  Description of Artificial Sequence: Synthetic amino acid sequence
  MOD_RES (2)..(4): Variable amino acid
  MOD_RES (6)..(14): Variable amino acid
  MOD_RES (16)..(16): Variable amino acid
  MOD_RES (17)..(19): Variable amino acid that may or may not be present
  MOD_RES (20)..(22): Variable amino acid
  MOD_RES (24)..(24): Variable amino acid
CXXXCXXXXXXXXXCXXXXXXXCXC

SEQ ID NO: 384 - protein, 25 aa, Artificial Sequence
  Description of Artificial Sequence: Synthetic amino acid sequence
  MOD_RES (2)..(3): Variable amino acid
  MOD_RES (6)..(8): Variable amino acid
  MOD_RES (10)..(11): Variable amino acid
  MOD_RES (14)..(14): Variable amino acid
  MOD_RES (16)..(17): Variable amino acid
  MOD_RES (18)..(19): Variable amino acid that may or may not be present
  MOD_RES (20)..(22): Variable amino acid
  MOD_RES (24)..(24): Variable amino acid
CXXHCXXXGXXGGXCXXXXXXXCXC

SEQ ID NO: 385 - protein, 31 aa, Artificial Sequence; identical to SEQ ID NO: 89
  Description of Artificial Sequence: Synthetic amino acid sequence
  MOD_RES (2)..(7): Variable amino acid
  MOD_RES (9)..(12): Variable amino acid
  MOD_RES (14)..(22): Variable amino acid
  MOD_RES (24)..(29): Variable amino acid

SEQ ID NO: 386 - protein, 31 aa, Artificial Sequence; identical to SEQ ID NO: 90
  Description of Artificial Sequence: Synthetic amino acid sequence
  MOD_RES (2)..(5): Variable amino acid
  MOD_RES (7)..(7): Variable amino acid
  MOD_RES (9)..(12): Variable amino acid
  MOD_RES (14)..(20): Variable amino acid
  MOD_RES (22)..(22): Variable amino acid
  MOD_RES (24)..(29): Variable amino acid

SEQ ID NO: 387 - protein, 32 aa, Artificial Sequence; identical to SEQ ID NO: 86
  Description of Artificial Sequence: Synthetic amino acid sequence
  MOD_RES (2)..(5): Variable amino acid
  MOD_RES (7)..(7): Variable amino acid
  MOD_RES (10)..(10): Variable amino acid
  MOD_RES (12)..(14): Variable amino acid
  MOD_RES (17)..(23): Variable amino acid
  MOD_RES (25)..(25): Variable amino acid
  MOD_RES (27)..(28): Variable amino acid

SEQ ID NO: 388 - protein, 32 aa, Artificial Sequence
  Description of Artificial Sequence: Synthetic amino acid sequence
  MOD_RES (2)..(2): Variable amino acid
  MOD_RES (4)..(5): Variable amino acid
  MOD_RES (7)..(7): Variable amino acid
  MOD_RES (10)..(10): Variable amino acid
  MOD_RES (12)..(14): Variable amino acid
  MOD_RES (17)..(23): Variable amino acid
  MOD_RES (25)..(25): Variable amino acid
  MOD_RES (27)..(28): Variable amino acid
CXSXXGXCRXKXXXNCXXXXXXXCXNXXQKCC

SEQ ID NO: 389 - protein, 45 aa, Artificial Sequence
  Description of Artificial Sequence: Synthetic amino acid sequence
  MOD_RES (1)..(2): Variable amino acid
  MOD_RES (5)..(14): Variable amino acid
  MOD_RES (16)..(24): Variable amino acid
  MOD_RES (26)..(30): Variable amino acid
  MOD_RES (32)..(38): Variable amino acid
  MOD_RES (40)..(45): Variable amino acid
XXCCXXXXXXXXXXCXXXXXXXXXCXXXXXCXXXXXXXCXXXXXX

SEQ ID NO: 390 - protein, 46 aa, Artificial Sequence
  Description of Artificial Sequence: Synthetic amino acid sequence
  MOD_RES (1)..(2): Variable amino acid
  MOD_RES (5)..(9): Variable amino acid
  MOD_RES (11)..(12): Variable amino acid
  MOD_RES (14)..(15): Variable amino acid
  MOD_RES (17)..(19): Variable amino acid
  MOD_RES (21)..(25): Variable amino acid
  MOD_RES (27)..(31): Variable amino acid
  MOD_RES (33)..(33): Variable amino acid
  MOD_RES (35)..(39): Variable amino acid
  MOD_RES (41)..(46): Variable amino acid
XXCCXXXXXRXXYXXCXXXGXXXXXCXXXXXCXIXXXXXCXXXXXX

SEQ ID NO: 391 - protein, 47 aa, Artificial Sequence
  Description of Artificial Sequence: Synthetic amino acid sequence
  MOD_RES (1)..(2): Variable amino acid
  MOD_RES (5)..(9): Variable amino acid
  MOD_RES (11)..(12): Variable amino acid
  MOD_RES (14)..(15): Variable amino acid
  MOD_RES (18)..(19): Variable amino acid
  MOD_RES (21)..(25): Variable amino acid
  MOD_RES (28)..(31): Variable amino acid
  MOD_RES (33)..(33): Variable amino acid
  MOD_RES (38)..(39): Variable amino acid
  MOD_RES (42)..(43): Variable amino acid
  MOD_RES (44)..(45): May or may not be present
  MOD_RES (46)..(47): Variable amino acid
XXCCXXXXXRXXYXXCRXXGXXXXXCAXXXXCXIISGXXCPXXYFXX

SEQ ID NO: 392 - protein, 39 aa, Artificial Sequence
  Description of Artificial Sequence: Synthetic amino acid sequence
  MOD_RES (1)..(2): Variable amino acid
  MOD_RES (5)..(11): Variable amino acid
  MOD_RES (13)..(15): Variable amino acid
  MOD_RES (17)..(24): Variable amino acid
  MOD_RES (26)..(28): Variable amino acid
  MOD_RES (30)..(30): Variable amino acid
  MOD_RES (32)..(38): Variable amino acid
XXCCXXXXXXXCXXXCXXXXXXXXCXXXCXCXXXXXXXC

SEQ ID NO: 393 - protein, 36 aa, Artificial Sequence
  Description of Artificial Sequence: Synthetic amino acid sequence
  MOD_RES (2)..(7): Variable amino acid
  MOD_RES (9)..(12): Variable amino acid
  MOD_RES (14)..(16): Variable amino acid
  MOD_RES (18)..(25): Variable amino acid
  MOD_RES (27)..(35): Variable amino acid
CXXXXXXCXXXXCXXXCXXXXXXXXCXXXXXXXXXC

SEQ ID NO: 394 - protein, 36 aa, Artificial Sequence; identical to SEQ ID NO: 100
  Description of Artificial Sequence: Synthetic amino acid sequence
  MOD_RES (2)..(3): Variable amino acid
  MOD_RES (5)..(7): Variable amino acid
  MOD_RES (9)..(12): Variable amino acid
  MOD_RES (14)..(16): Variable amino acid
  MOD_RES (18)..(25): Variable amino acid
  MOD_RES (27)..(35): Variable amino acid

SEQ ID NO: 395 - protein, 41 aa, Artificial Sequence
  Description of Artificial Sequence: Synthetic amino acid sequence
  MOD_RES (2)..(14): Variable amino acid
  MOD_RES (18)..(21): Variable amino acid
  MOD_RES (22)..(23): Variable amino acid that may or may not be present
  MOD_RES (24)..(28): Variable amino acid
  MOD_RES (30)..(31): Variable amino acid
  MOD_RES (34)..(40): Variable amino acid
CXXXXXXXXXXXXXCCCXXXXXXXXXXXCXXCPXXXXXXXC

SEQ ID NO: 396 - protein, 41 aa, Artificial Sequence
  Description of Artificial Sequence: Synthetic amino acid sequence
  MOD_RES (2)..(8): Variable amino acid
  MOD_RES (9)..(9): Variable amino acid that may or may not be present
  MOD_RES (10)..(11): Variable amino acid
  MOD_RES (13)..(14): Variable amino acid
  MOD_RES (18)..(21): Variable amino acid
  MOD_RES (22)..(23): Variable amino acid that may or may not be present
  MOD_RES (24)..(25): Variable amino acid
  MOD_RES (27)..(28): Variable amino acid
  MOD_RES (31)..(31): Variable amino acid
  MOD_RES (34)..(40): Variable amino acid
CXXXXXXXXXXKXXCCCXXXXXXXXGXXCEXCPXXXXXXXC

SEQ ID NO: 397 - protein, 25 aa, Artificial Sequence
  Description of Artificial Sequence: Synthetic amino acid sequence
  MOD_RES (2)..(4): Variable amino acid
  MOD_RES (6)..(9): Variable amino acid
  MOD_RES (11)..(17): Variable amino acid
  MOD_RES (19)..(19): Variable amino acid
  MOD_RES (21)..(24): Variable amino acid
CXXXCXXXXCXXXXXXXCXCXXXXC

SEQ ID NO: 398 - protein, 25 aa, Artificial Sequence
  Description of Artificial Sequence: Synthetic amino acid sequence
  MOD_RES (2)..(2): Variable amino acid
  MOD_RES (4)..(4): Variable amino acid
  MOD_RES (6)..(9): Variable amino acid
  MOD_RES (11)..(16): Variable amino acid
  MOD_RES (19)..(19): Variable amino acid
  MOD_RES (21)..(24): Variable amino acid
CXEXCXXXXCXXXXXXGCXCXXXXC

SEQ ID NO: 399 - protein, 20 aa, Artificial Sequence
  Description of Artificial Sequence: Synthetic amino acid sequence
  MOD_RES (1)..(3): Variable amino acid
  MOD_RES (5)..(6): Variable amino acid
  MOD_RES (9)..(9): Variable amino acid
  MOD_RES (12)..(15): Variable amino acid
  MOD_RES (17)..(18): Variable amino acid
XXXCXXCCXCCXXXXCXXCC

SEQ ID NO: 400 - protein, 20 aa, Artificial Sequence
  Description of Artificial Sequence: Synthetic amino acid sequence
  MOD_RES (3)..(3): Variable amino acid
  MOD_RES (5)..(5): Variable amino acid
  MOD_RES (9)..(9): Variable amino acid
  MOD_RES (12)..(15): Variable amino acid
  MOD_RES (18)..(18): Variable amino acid
FPXCXFCCXCCXXXXCGXCC

SEQ ID NO: 401 - protein, 39 aa, Artificial Sequence
  Description of Artificial Sequence: Synthetic amino acid sequence
  MOD_RES (2)..(7): Variable amino acid
  MOD_RES (9)..(13): Variable amino acid
  MOD_RES (17)..(19): Variable amino acid
  MOD_RES (21)..(28): Variable amino acid
  MOD_RES (30)..(38): Variable amino acid
CXXXXXXCXXXXXCCCXXXCXXXXXXXXCXXXXXXXXXC

SEQ ID NO: 402 - protein, 39 aa, Artificial Sequence
  Description of Artificial Sequence: Synthetic amino acid sequence
  MOD_RES (2)..(6): Variable amino acid
  MOD_RES (9)..(13): Variable amino acid
  MOD_RES (18)..(19): Variable amino acid
  MOD_RES (21)..(22): Variable amino acid
  MOD_RES (24)..(28): Variable amino acid
  MOD_RES (30)..(38): Variable amino acid
CXXXXXWCXXXXXCCCPXXCXXWXXXXXCXXXXXXXXXC

SEQ ID NO: 403 - protein, 27 aa, Artificial Sequence
  Description of Artificial Sequence: Synthetic amino acid sequence
  MOD_RES (2)..(7): Variable amino acid
  MOD_RES (9)..(13): Variable amino acid
  MOD_RES (15)..(17): Variable amino acid
  MOD_RES (19)..(19): Variable amino acid
  MOD_RES (21)..(24): Variable amino acid
  MOD_RES (25)..(25): Variable amino acid that may or may not be present
  MOD_RES (26)..(26): Variable amino acid
CXXXXXXCXXXXXCXXXCXCXXXXXXC

SEQ ID NO: 404 - protein, 28 aa, Artificial Sequence
  Description of Artificial Sequence: Synthetic amino acid sequence
  MOD_RES (3)..(7): Variable amino acid
  MOD_RES (9)..(10): Variable amino acid
  MOD_RES (12)..(12): Variable amino acid
  MOD_RES (15)..(17): Variable amino acid
  MOD_RES (19)..(19): Variable amino acid
  MOD_RES (21)..(24): Variable amino acid
  MOD_RES (25)..(25): Variable amino acid that may or may not be present
  MOD_RES (26)..(26): Variable amino acid
CPXXXXXCXXPXPCXXXCXCXXXXXXCG

SEQ ID NO: 405 - protein, 36 aa, Artificial Sequence
  Description of Artificial Sequence: Synthetic amino acid sequence
  MOD_RES (3)..(8): Variable amino acid
  MOD_RES (9)..(12): Variable amino acid that may or may not be present
  MOD_RES (13)..(14): Variable amino acid
  MOD_RES (16)..(23): Variable amino acid
  MOD_RES (24)..(25): Variable amino acid that may or may not be present
  MOD_RES (26)..(27): Variable amino acid
  MOD_RES (29)..(34): Variable amino acid
CCXXXXXXXXXXXXCXXXXXXXXXXXXCXXXXXXCC

SEQ ID NO: 406 - protein, 36 aa, Artificial Sequence
  Description of Artificial Sequence: Synthetic amino acid sequence
  MOD_RES (3)..(4): Variable amino acid
  MOD_RES (6)..(8): Variable amino acid
  MOD_RES (9)..(12): Variable amino acid that may or may not be present
  MOD_RES (13)..(14): Variable amino acid
  MOD_RES (16)..(23): Variable amino acid
  MOD_RES (24)..(25): Variable amino acid that may or may not be present
  MOD_RES (26)..(27): Variable amino acid
  MOD_RES (29)..(31): Variable amino acid
  MOD_RES (33)..(34): Variable amino acid
CCXXGXXXXXXXXXCXXXXXXXXXXXXCXXXFXXCC

SEQ ID NO: 407 - protein, 37 aa, Artificial Sequence
  Description of Artificial Sequence: Synthetic amino acid sequence
  MOD_RES (2)..(8): Variable amino acid
  MOD_RES (10)..(15): Variable amino acid
  MOD_RES (17)..(23): Variable amino acid
  MOD_RES (25)..(32): Variable amino acid
  MOD_RES (34)..(36): Variable amino acid
CXXXXXXXCXXXXXXCXXXXXXXCXXXXXXXXCXXXC

SEQ ID NO: 408 - protein, 39 aa, Artificial Sequence
  Description of Artificial Sequence: Synthetic amino acid sequence
  MOD_RES (2)..(3): Variable amino acid
  MOD_RES (5)..(8): Variable amino acid
  MOD_RES (10)..(14): Variable amino acid
  MOD_RES (18)..(18): Variable amino acid
  MOD_RES (22)..(23): Variable amino acid
  MOD_RES (25)..(32): Variable amino acid
  MOD_RES (34)..(35): Variable amino acid
  MOD_RES (38)..(38): Variable amino acid
CXXWXXXXCXXXXXDCGXGREXXCXXXXXXXXCXXPCXW

SEQ ID NO: 409 - protein, 36 aa, Artificial Sequence
  Description of Artificial Sequence: Synthetic amino acid sequence
  MOD_RES (2)..(5): Variable amino acid
  MOD_RES (6)..(7): Variable amino acid that may or may not be present
  MOD_RES (8)..(11): Variable amino acid
  MOD_RES (13)..(15): Variable amino acid
  MOD_RES (16)..(18): Variable amino acid that may or may not be present
  MOD_RES (20)..(24): Variable amino acid
  MOD_RES (26)..(30): Variable amino acid
  MOD_RES (33)..(35): Variable amino acid
CXXXXXXXXXXCXXXXXXCXXXXXCXXXXXCCXXXC

SEQ ID NO: 410 - protein, 36 aa, Artificial Sequence
  Description of Artificial Sequence: Synthetic amino acid sequence
  MOD_RES (3)..(5): Variable amino acid
  MOD_RES (6)..(7): Variable amino acid that may or may not be present
  MOD_RES (8)..(11): Variable amino acid
  MOD_RES (13)..(15): Variable amino acid
  MOD_RES (16)..(18): Variable amino acid that may or may not be present
  MOD_RES (20)..(21): Variable amino acid
  MOD_RES (23)..(24): Variable amino acid
  MOD_RES (26)..(29): Variable amino acid
  MOD_RES (33)..(35): Variable amino acid
CPXXXXXXXXXCXXXXXXCXXDXXCXXXXKCCXXXC

SEQ ID NO: 411 - protein, 41 aa, Artificial Sequence; identical to SEQ ID NO: 146
  Description of Artificial Sequence: Synthetic amino acid sequence
  MOD_RES (2)..(4): Variable amino acid
  MOD_RES (6)..(11): Variable amino acid
  MOD_RES (13)..(14): Variable amino acid
  MOD_RES (16)..(25): Variable amino acid
  MOD_RES (27)..(29): Variable amino acid
  MOD_RES (31)..(36): Variable amino acid
  MOD_RES (38)..(40): Variable amino acid

SEQ ID NO: 412 - protein, 41 aa, Artificial Sequence
  Description of Artificial Sequence: Synthetic amino acid sequence
  MOD_RES (2)..(4): Variable amino acid
  MOD_RES (6)..(8): Variable amino acid
  MOD_RES (10)..(11): Variable amino acid
  MOD_RES (13)..(14): Variable amino acid
  MOD_RES (16)..(16): Variable amino acid
  MOD_RES (18)..(18): Variable amino acid
  MOD_RES (20)..(20): Variable amino acid
  MOD_RES (22)..(23): Variable amino acid
  MOD_RES (25)..(25): Variable amino acid
  MOD_RES (27)..(28): Variable amino acid
  MOD_RES (31)..(36): Variable amino acid
  MOD_RES (38)..(40): Variable amino acid
CXXXCXXXYXXCXXCXGXWXGXXGXCXXHCXXXXXXCXXXC

SEQ ID NO: 413 - protein, 34 aa, Artificial Sequence
  Description of Artificial Sequence: Synthetic amino acid sequence
  MOD_RES (2)..(2): Variable amino acid
  MOD_RES (4)..(6): Variable amino acid
  MOD_RES (11)..(14): Variable amino acid
  MOD_RES (17)..(19): Variable amino acid
  MOD_RES (21)..(26): Variable amino acid
  MOD_RES (28)..(33): Variable amino acid
CXPXXXPCPYXXXXCCXXXCXXXXXXGXXXXXXC

SEQ ID NO: 414 - protein, 51 aa, Artificial Sequence
  Description of Artificial Sequence: Synthetic amino acid sequence
  MOD_RES (2)..(12): Variable amino acid
  MOD_RES (14)..(21): Variable amino acid
  MOD_RES (23)..(23): Variable amino acid
  MOD_RES (25)..(27): Variable amino acid
  MOD_RES (29)..(36): Variable amino acid
  MOD_RES (38)..(38): Variable amino acid
  MOD_RES (40)..(40): Variable amino acid
  MOD_RES (42)..(49): Variable amino acid
CXXXXXXXXXXXCXXXXXXXXCXCXXXCXXXXXXXXCXCXCXXXXXXXXCC

SEQ ID NO: 415 - protein, 51 aa, Artificial Sequence
  Description of Artificial Sequence: Synthetic amino acid sequence
  MOD_RES (2)..(12): Variable amino acid
  MOD_RES (15)..(15): Variable amino acid
  MOD_RES (17)..(21): Variable amino acid
  MOD_RES (23)..(23): Variable amino acid
  MOD_RES (26)..(27): Variable amino acid
  MOD_RES (30)..(30): Variable amino acid
  MOD_RES (32)..(36): Variable amino acid
  MOD_RES (38)..(38): Variable amino acid
  MOD_RES (40)..(40): Variable amino acid
  MOD_RES (42)..(44): Variable amino acid
  MOD_RES (47)..(48): Variable amino acid
CXXXXXXXXXXXCPXGXXXXXCXCGXXCGXWXXXXXCXCXCXXXDWXXRCC

SEQ ID NO: 416 - protein, 33 aa, Artificial Sequence
  Description of Artificial Sequence: Synthetic amino acid sequence
  MOD_RES (2)..(2): Variable amino acid
  MOD_RES (3)..(4): Variable amino acid that may or may not be present
  MOD_RES (5)..(7): Variable amino acid
  MOD_RES (9)..(16): Variable amino acid
  MOD_RES (18)..(20): Variable amino acid
  MOD_RES (22)..(25): Variable amino acid
  MOD_RES (27)..(32): Variable amino acid
CXXXXXXCXXXXXXXXCXXXCXXXXCXXXXXXC

SEQ ID NO: 417 - protein, 33 aa, Artificial Sequence
  Description of Artificial Sequence: Synthetic amino acid sequence
  MOD_RES (2)..(2): Variable amino acid
  MOD_RES (3)..(4): Variable amino acid that may or may not be present
  MOD_RES (5)..(7): Variable amino acid
  MOD_RES (9)..(14): Variable amino acid
  MOD_RES (16)..(16): Variable amino acid
  MOD_RES (18)..(20): Variable amino acid
  MOD_RES (23)..(25): Variable amino acid
  MOD_RES (27)..(28): Variable amino acid
  MOD_RES (31)..(31): Variable amino acid
CXXXXXXCXXXXXXGXCXXXCNXXXCXXDGXDC

SEQ ID NO: 418 - protein, 42 aa, Artificial Sequence
  Description of Artificial Sequence: Synthetic amino acid sequence
  MOD_RES (2)..(4): Variable amino acid
  MOD_RES (5)..(5): Variable amino acid that may or may not be present
  MOD_RES (6)..(12): Variable amino acid
  MOD_RES (13)..(13): Variable amino acid that may or may not be present
  MOD_RES (14)..(15): Variable amino acid
  MOD_RES (17)..(17): Variable amino acid
  MOD_RES (18)..(18): Variable amino acid that may or may not be present
  MOD_RES (20)..(21): Variable amino acid
  MOD_RES (23)..(24): Variable amino acid
  MOD_RES (25)..(26): Variable amino acid that may or may not be present
  MOD_RES (27)..(33): Variable amino acid
  MOD_RES (35)..(41): Variable amino acid
CXXXXXXXXXXXXXXCXXCXXCXXXXXXXXXXXCXXXXXXXC

SEQ ID NO: 419 - protein, 42 aa, Artificial Sequence
  Description of Artificial Sequence: Synthetic amino acid sequence
  MOD_RES (2)..(4): Variable amino acid
  MOD_RES (5)..(5): Variable amino acid that may or may not be present
  MOD_RES (6)..(6): Variable amino acid
  MOD_RES (7)..(7): Tyr or Phe
  MOD_RES (8)..(12): Variable amino acid
  MOD_RES (13)..(13): Variable amino acid that may or may not be present
  MOD_RES (14)..(15): Variable amino acid
  MOD_RES (17)..(17): Variable amino acid
  MOD_RES (18)..(18): Variable amino acid that may or may not be present
  MOD_RES (20)..(21): Variable amino acid
  MOD_RES (23)..(24): Variable amino acid
  MOD_RES (25)..(26): Variable amino acid that may or may not be present
  MOD_RES (28)..(33): Variable amino acid
  MOD_RES (35)..(39): Variable amino acid
  MOD_RES (41)..(41): Variable amino acid
CXXXXXXXXXXXXXXCXXCXXCXXXXGXXXXXXCXXXXXTXC

SEQ ID NO: 420 - protein, 42 aa, Artificial Sequence
  Description of Artificial Sequence: Synthetic amino acid sequence
  MOD_RES (2)..(2): Variable amino acid
  MOD_RES (6)..(14): Variable amino acid
  MOD_RES (16)..(25): Variable amino acid
  MOD_RES (28)..(35): Variable amino acid
  MOD_RES (37)..(41): Variable amino acid
CXFPFXXXXXXXXXCXXXXXXXXXXWCXXXXXXXXDXXXXXC

SEQ ID NO: 421 - protein, 65 aa, Artificial Sequence
  Description of Artificial Sequence: Synthetic amino acid sequence
  MOD_RES (2)..(3): Variable amino acid
  MOD_RES (4)..(6): Variable amino acid that may or may not be present
  MOD_RES (7)..(9): Variable amino acid
  MOD_RES (11)..(11): Variable amino acid
  MOD_RES (14)..(23): Variable amino acid
  MOD_RES (26)..(33): Variable amino acid
  MOD_RES (35)..(39): Variable amino acid
  MOD_RES (41)..(44): Variable amino acid
  MOD_RES (45)..(48): Variable amino acid that may or may not be present
  MOD_RES (49)..(56): Variable amino acid
  MOD_RES (58)..(64): Variable amino acid
CXXXXXXXXYXCCXXXXXXXXXXWCXXXXXXXXDXXXXXCXXXXXXXXXXXXXXXXWXXXXXXXC

SEQ ID NO: 422 - protein, 27 aa, Artificial Sequence
  Description of Artificial Sequence: Synthetic amino acid sequence
  MOD_RES (2)..(7): Variable amino acid
  MOD_RES (9)..(13): Variable amino acid
  MOD_RES (15)..(17): Variable amino acid
  MOD_RES (19)..(19): Variable amino acid
  MOD_RES (21)..(26): Variable amino acid
CXXXXXXCXXXXXCXXXCXCXXXXXXC

SEQ ID NO: 423 - protein, 28 aa, Artificial Sequence
  Description of Artificial Sequence: Synthetic amino acid sequence
  MOD_RES (3)..(3): Variable amino acid
  MOD_RES (5)..(7): Variable amino acid
  MOD_RES (9)..(10): Variable amino acid
  MOD_RES (12)..(12): Variable amino acid
  MOD_RES (15)..(17): Variable amino acid
  MOD_RES (19)..(19): Variable amino acid
  MOD_RES (21)..(26): Variable amino acid
CPXIXXXCXXDXDCXXXCXCXXXXXXCG

SEQ ID NO: 424 - protein, 31 aa, Artificial Sequence; identical to SEQ ID NO: 189
  Description of Artificial Sequence: Synthetic amino acid sequence
  MOD_RES (2)..(7): Variable amino acid
  MOD_RES (9)..(14): Variable amino acid
  MOD_RES (17)..(20): Variable amino acid
  MOD_RES (22)..(30): Variable amino acid

SEQ ID NO: 425 - protein, 31 aa, Artificial Sequence; identical to SEQ ID NO: 188
  Description of Artificial Sequence: Synthetic amino acid sequence
  MOD_RES (2)..(7): Variable amino acid
  MOD_RES (9)..(14): Variable amino acid
  MOD_RES (17)..(20): Variable amino acid
  MOD_RES (22)..(25): Variable amino acid
  MOD_RES (28)..(30): Variable amino acid

SEQ ID NO: 426 - protein, 24 aa, Artificial Sequence
  Description of Artificial Sequence: Synthetic amino acid sequence
  MOD_RES (3)..(3): Variable amino acid
  MOD_RES (5)..(12): Variable amino acid
  MOD_RES (14)..(23): Variable amino acid
CCXCXXXXXXXXCXXXXXXXXXXC

SEQ ID NO: 427 - protein, 36 aa, Artificial Sequence; identical to SEQ ID NO: 204
  Description of Artificial Sequence: Synthetic amino acid sequence
  MOD_RES (2)..(4): Variable amino acid
  MOD_RES (6)..(7): Variable amino acid
  MOD_RES (9)..(20): Variable amino acid
  MOD_RES (22)..(24): Variable amino acid
  MOD_RES (26)..(35): Variable amino acid

SEQ ID NO: 428 - protein, 36 aa, Artificial Sequence
  Description of Artificial Sequence: Synthetic amino acid sequence
  MOD_RES (2)..(3): Variable amino acid
  MOD_RES (6)..(6): Variable amino acid
  MOD_RES (10)..(10): Variable amino acid
  MOD_RES (12)..(12): Variable amino acid
  MOD_RES (14)..(15): Variable amino acid
  MOD_RES (17)..(17): Variable amino acid
  MOD_RES (19)..(20): Variable amino acid
  MOD_RES (22)..(24): Variable amino acid
  MOD_RES (26)..(29): Variable amino acid
  MOD_RES (31)..(33): Variable amino acid
  MOD_RES (35)..(35): Variable amino acid
CXXNCXQCKXMXGXXFXGXXCXXXCXXXXGXXXPXC

SEQ ID NO: 429 - protein, 41 aa, Artificial Sequence; identical to SEQ ID NO: 207
  Description of Artificial Sequence: Synthetic amino acid sequence
  MOD_RES (2)..(4): Variable amino acid
  MOD_RES (6)..(7): Variable amino acid
  MOD_RES (9)..(23): Variable amino acid
  MOD_RES (25)..(27): Variable amino acid
  MOD_RES (29)..(40): Variable amino acid

SEQ ID NO: 430 - protein, 41 aa, Artificial Sequence
  Description of Artificial Sequence: Synthetic amino acid sequence
  MOD_RES (2)..(4): Variable amino acid
  MOD_RES (6)..(7): Variable amino acid
  MOD_RES (9)..(23): Variable amino acid
  MOD_RES (25)..(25): Variable amino acid
  MOD_RES (27)..(27): Variable amino acid
  MOD_RES (29)..(37): Variable amino acid
  MOD_RES (39)..(40): Variable amino acid
CXXXCXXCXXXXXXXXXXXXXXXCXLXCXXXXXXXXXWXXC

SEQ ID NO: 431 - protein, 7 aa, Aplysia sp.
IEECKTS

SEQ ID NO: 432 - protein, 38 aa, Artificial Sequence; identical to SEQ ID NO: 209
  Description of Artificial Sequence: Synthetic amino acid sequence
  MOD_RES (2)..(9): Variable amino acid
  MOD_RES (11)..(16): Variable amino acid
  MOD_RES (18)..(22): Variable amino acid
  MOD_RES (24)..(29): Variable amino acid
  MOD_RES (31)..(37): Variable amino acid

SEQ ID NO: 433 - protein, 70 aa, Artificial Sequence
  Description of Artificial Sequence: Synthetic amino acid sequence
  MOD_RES (3)..(7): Variable amino acid
  MOD_RES (9)..(9): Variable amino acid
  MOD_RES (13)..(16): Variable amino acid
  MOD_RES (18)..(19): Variable amino acid
  MOD_RES (21)..(22): Variable amino acid
  MOD_RES (24)..(26): Variable amino acid
  MOD_RES (34)..(35): Variable amino acid
  MOD_RES (37)..(37): Variable amino acid
  MOD_RES (39)..(44): Variable amino acid
  MOD_RES (47)..(52): Variable amino acid
  MOD_RES (54)..(54): Variable amino acid that may or may not be present
  MOD_RES (55)..(58): Variable amino acid
  MOD_RES (60)..(65): Variable amino acid
  MOD_RES (67)..(69): Variable amino acid
CDXXXXXSXCQMXXXXCXXAXXCXXXIEECKTSXXEXCXXXXXXCCXXXXXXCXXXXXCXXXXXXCXXXC

SEQ ID NO: 434 - protein, 33 aa, Artificial Sequence
  Description of Artificial Sequence: Synthetic amino acid sequence
  MOD_RES (3)..(6): Variable amino acid
  MOD_RES (10)..(12): Variable amino acid
  MOD_RES (14)..(14): Variable amino acid
  MOD_RES (17)..(17): Variable amino acid that may or may not be present
  MOD_RES (18)..(21): Variable amino acid
  MOD_RES (24)..(28): Variable amino acid
  MOD_RES (30)..(32): Variable amino acid
CGXXXXYCCXXXGXYCXXXXXCYXXXXXCXXXC

SEQ ID NO: 435 - protein, 61 aa, Artificial Sequence
  Description of Artificial Sequence: Synthetic amino acid sequence
  MOD_RES (2)..(6): Variable amino acid
  MOD_RES (8)..(9): Variable amino acid
  MOD_RES (11)..(16): Variable amino acid
  MOD_RES (17)..(17): Variable amino acid that may or may not be present
  MOD_RES (18)..(18): Variable amino acid
  MOD_RES (20)..(21): Variable amino acid
  MOD_RES (23)..(27): Variable amino acid
  MOD_RES (29)..(32): Variable amino acid
  MOD_RES (33)..(38): Variable amino acid that may or may not be present
  MOD_RES (39)..(39): Variable amino acid
  MOD_RES (41)..(44): Variable amino acid
  MOD_RES (45)..(54): Variable amino acid that may or may not be present
  MOD_RES (55)..(60): Variable amino acid
CXXXXXCXXCXXXXXXXXCXXCXXXXXCXXXXXXXXXXXCXXXXXXXXXXXXXXXXXXXXC

SEQ ID NO: 436 - protein, 61 aa, Artificial Sequence
  Description of Artificial Sequence: Synthetic amino acid sequence
  MOD_RES (2)..(6): Variable amino acid
  MOD_RES (8)..(9): Variable amino acid
  MOD_RES (11)..(16): Variable amino acid
  MOD_RES (17)..(17): Variable amino acid that may or may not be present
  MOD_RES (18)..(18): Variable amino acid
  MOD_RES (20)..(20): Variable amino acid
  MOD_RES (23)..(27): Variable amino acid
  MOD_RES (29)..(32): Variable amino acid
  MOD_RES (33)..(38): Variable amino acid that may or may not be present
  MOD_RES (39)..(39): Variable amino acid
  MOD_RES (41)..(44): Variable amino acid
  MOD_RES (45)..(54): Variable amino acid that may or may not be present
  MOD_RES (55)..(60): Variable amino acid
CXXXXXCXXCXXXXXXXXCXWCXXXXXCXXXXXXXXXXXCXXXXXXXXXXXXXXXXXXXXC

SEQ ID NO: 437 - protein, 115 aa, Artificial Sequence
  Description of Artificial Sequence: Synthetic amino acid sequence
  MOD_RES (2)..(6): Variable amino acid
  MOD_RES (8)..(9): Variable amino acid
  MOD_RES (11)..(16): Variable amino acid
  MOD_RES (17)..(17): Variable amino acid that may or may not be present
  MOD_RES (18)..(18): Variable amino acid
  MOD_RES (20)..(21): Variable amino acid
  MOD_RES (23)..(27): Variable amino acid
  MOD_RES (29)..(32): Variable amino acid
  MOD_RES (33)..(38): Variable amino acid that may or may not be present
  MOD_RES (39)..(39): Variable amino acid
  MOD_RES (41)..(48): Variable amino acid
  MOD_RES (49)..(53): Variable amino acid that may or may not be present
  MOD_RES (55)..(59): Variable amino acid
  MOD_RES (61)..(62): Variable amino acid
  MOD_RES (64)..(69): Variable amino acid
  MOD_RES (70)..(70): Variable amino acid that may or may not be present
  MOD_RES (71)..(71): Variable amino acid
  MOD_RES (73)..(74): Variable amino acid
  MOD_RES (76)..(80): Variable amino acid
  MOD_RES (82)..(85): Variable amino acid
  MOD_RES (86)..(91): Variable amino acid that may or may not be present
  MOD_RES (92)..(92): Variable amino acid
  MOD_RES (94)..(97): Variable amino acid
  MOD_RES (98)..(107): Variable amino acid that may or may not be present
  MOD_RES (108)..(113): Variable amino acid
CXXXXXCXXCXXXXXXXXCXXCXXXXXCXXXXXXXXXXXCXXXXXXXXXXXXXCXXXXXCXXCXXXXXXXXCXXCXXXXXCXXXXXXXXXXXCXXXXXXXXXXXXXXXXXXXXCC

SEQ ID NO: 438 - protein, 176 aa, Artificial Sequence
  Description of Artificial Sequence: Synthetic amino acid sequence
  MOD_RES (2)..(6): Variable amino acid
  MOD_RES (8)..(9): Variable amino acid
  MOD_RES (11)..(16): Variable amino acid
  MOD_RES (17)..(17): Variable amino acid that may or may not be present
  MOD_RES (18)..(18): Variable amino acid
  MOD_RES (20)..(21): Variable amino acid
  MOD_RES (23)..(27): Variable amino acid
  MOD_RES (29)..(32): Variable amino acid
  MOD_RES (33)..(38): Variable amino acid that may or may not be present
  MOD_RES (39)..(39): Variable amino acid
  MOD_RES (41)..(48): Variable amino acid
  MOD_RES (49)..(53): Variable amino acid that may or may not be present
  MOD_RES (55)..(59): Variable amino acid
  MOD_RES (61)..(62): Variable amino acid
  MOD_RES (64)..(69): Variable amino acid
  MOD_RES (70)..(70): Variable amino acid that may or may not be present
  MOD_RES (71)..(71): Variable amino acid
  MOD_RES (73)..(74): Variable amino acid
  MOD_RES (76)..(80): Variable amino acid
  MOD_RES (82)..(85): Variable amino acid
  MOD_RES (86)..(91): Variable amino acid that may or may not be present
  MOD_RES (92)..(92): Variable amino acid
  MOD_RES (94)..(97): Variable amino acid
  MOD_RES (98)..(107): Variable amino acid that may or may not be present
  MOD_RES (108)..(113): Variable amino acid
  MOD_RES (115)..(119): Variable amino acid
  MOD_RES (121)..(122): Variable amino acid
  MOD_RES (124)..(129): Variable amino acid
  MOD_RES (130)..(130): Variable amino acid that may or may not be present
  MOD_RES (131)..(131): Variable amino acid
  MOD_RES (133)..(134): Variable amino acid
  MOD_RES (136)..(140): Variable amino acid
  MOD_RES (142)..(145): Variable amino acid
  MOD_RES (146)..(151): Variable amino acid that may or may not be present
  MOD_RES (152)..(152): Variable amino acid
  MOD_RES (154)..(157): Variable amino acid
  MOD_RES (158)..(167): Variable amino acid that may or may not be present
  MOD_RES (168)..(173): Variable amino acid
CXXXXXCXXCXXXXXXXXCXXCXXXXXCXXXXXXXXXXXCXXXXXXXXXXXXXCXXXXXCXXCXXXXXXXXCXXCXXXXXCXXXXXXXXXXXCXXXXXXXXXXXXXXXXXXXXCXXXXXCXXCXXXXXXXXCXXCXXXXXCXXXXXXXXXXXCXXXXXXXXXXXXXXXXXXXXCCC

SEQ ID NO: 439 - protein, 42 aa, Artificial Sequence
  Description of Artificial Sequence: Synthetic amino acid sequence
  MOD_RES (2)..(2): Variable amino acid that may or may not be present
  MOD_RES (3)..(11): Variable amino acid
  MOD_RES (13)..(14): Variable amino acid
  MOD_RES (15)..(15): Variable amino acid that may or may not be present
  MOD_RES (16)..(22): Variable amino acid
  MOD_RES (24)..(27): Variable amino acid
  MOD_RES (30)..(34): Variable amino acid
  MOD_RES (35)..(35): Variable amino acid that may or may not be present
  MOD_RES (36)..(40): Variable amino acid
  MOD_RES (42)..(42): Variable amino acid
CXXXXXXXXXXCXXXXXXXXXXCXXXXCCXXXXXXXXXXXCX

SEQ ID NO: 440 - protein, 42 aa, Artificial Sequence
  Description of Artificial Sequence: Synthetic amino acid sequence
  MOD_RES (2)..(2): Variable amino acid that may or may not be present
  MOD_RES (3)..(8): Variable amino acid
  MOD_RES (10)..(11): Variable amino acid
  MOD_RES (13)..(14): Variable amino acid
  MOD_RES (15)..(15): Variable amino acid that may or may not be present
  MOD_RES (16)..(22): Variable amino acid
  MOD_RES (24)..(27): Variable amino acid
  MOD_RES (31)..(34): Variable amino acid
  MOD_RES (35)..(35): Variable amino acid that may or may not be present
  MOD_RES (36)..(39): Variable amino acid
CXXXXXXXRXXCXXXXXXXXXXCXXXXCCFXXXXXXXXXWCF

SEQ ID NO: 441 - protein, 42 aa, Artificial Sequence
  Description of Artificial Sequence: Synthetic amino acid sequence
  MOD_RES (2)..(2): Variable amino acid that may or may not be present
  MOD_RES (3)..(8): Variable amino acid
  MOD_RES (10)..(11): Variable amino acid
  MOD_RES (14)..(14): Variable amino acid
  MOD_RES (15)..(15): Variable amino acid that may or may not be present
  MOD_RES (16)..(17): Variable amino acid
  MOD_RES (20)..(22): Variable amino acid
  MOD_RES (24)..(26): Variable amino acid
  MOD_RES (30)..(30): Phe, Trp or Tyr
  MOD_RES (32)..(34): Variable amino acid
  MOD_RES (35)..(35): Variable amino acid that may or may not be present
  MOD_RES (36)..(39): Variable amino acid
  MOD_RES (42)..(42): Phe or Tyr
CXXXXXXXRXXCGXXXXITXXXCXXXGCCXDXXXXXXXXWCX

SEQ ID NO: 442 - protein, 104 aa, Artificial Sequence
  Description of Artificial Sequence: Synthetic amino acid sequence
  MOD_RES (2)..(2): Variable amino acid
  MOD_RES (4)..(4): Variable amino acid that may or may not be present
  MOD_RES (5)..(13): Variable amino acid
  MOD_RES (15)..(16): Variable amino acid
  MOD_RES (17)..(17): Variable amino acid that may or may not be present
  MOD_RES (18)..(24): Variable amino acid
  MOD_RES (26)..(36): Variable amino acid
  MOD_RES (37)..(37): Variable amino acid that may or may not be present
  MOD_RES (38)..(42): Variable amino acid
  MOD_RES (32)..(42): Variable amino acid
  MOD_RES (44)..(54): Variable amino acid
  MOD_RES (56)..(56): Variable amino acid that may or may not be present
  MOD_RES (57)..(65): Variable amino acid
  MOD_RES (67)..(68): Variable amino acid
  MOD_RES (69)..(69): Variable amino acid that may or may not be present
  MOD_RES (70)..(76): Variable amino acid
  MOD_RES (78)..(81): Variable amino acid
  MOD_RES (84)..(88): Variable amino acid
  MOD_RES (89)..(89): Variable amino acid that may or may not be present
  MOD_RES (90)..(94): Variable amino acid
  MOD_RES (96)..(103): Variable amino acid
CXCXXXXXXXXXXCXXXXXXXXXXCXXXXCCXXXXXXXXXXXCXXXXXXXXXXXCXXXXXXXXXXCXXXXXXXXXXCXXXXCCXXXXXXXXXXXCXXXXXXXXC

SEQ ID NO: 443 - protein, 48 aa, Artificial Sequence; identical to SEQ ID NO: 223
  Description of Artificial Sequence: Synthetic amino acid sequence
  MOD_RES (2)..(4): Variable amino acid
  MOD_RES (6)..(15): Variable amino acid
  MOD_RES (17)..(20): Variable amino acid
  MOD_RES (21)..(23): Variable amino acid that may or may not be present
  MOD_RES (24)..(28): Variable amino acid
  MOD_RES (30)..(35): Variable amino acid
  MOD_RES (36)..(38): Variable amino acid that may or may not be present
  MOD_RES (39)..(41): Variable amino acid
  MOD_RES (43)..(43): Variable amino acid that may or may not be present
  MOD_RES (44)..(47): Variable amino acid

SEQ ID NO: 444 - protein, 49 aa, Artificial Sequence
  Description of Artificial Sequence: Synthetic amino acid sequence
  MOD_RES (2)..(4): Variable amino acid
  MOD_RES (6)..(7): Variable amino acid
  MOD_RES (9)..(11): Variable amino acid
  MOD_RES (13)..(15): Variable amino acid
  MOD_RES (17)..(20): Variable amino acid
  MOD_RES (21)..(21): May or may not be present
  MOD_RES (22)..(24): Variable amino acid that may or may not be present
  MOD_RES (25)..(29): Variable amino acid
  MOD_RES (31)..(36): Variable amino acid
  MOD_RES (37)..(39): Variable amino acid that may or may not be present
  MOD_RES (40)..(42): Variable amino acid
  MOD_RES (44)..(44): Variable amino acid that may or may not be present
  MOD_RES (45)..(48): Variable amino acid
CXXXCXXGXXXRXXXCXXXXPXXXXXXXXCXXXXXXXXXXXXCXXXXXC

SEQ ID NO: 445 - protein, 49 aa, Artificial Sequence
  Description of Artificial Sequence: Synthetic amino acid sequence
  MOD_RES (7)..(7): Variable amino acid
  MOD_RES (9)..(11): Variable amino acid
  MOD_RES (13)..(13): Variable amino acid
  MOD_RES (15)..(15): Variable amino acid
  MOD_RES (17)..(20): Variable amino acid
  MOD_RES (21)..(21): May or may not be present
  MOD_RES (22)..(24): Variable amino acid that may or may not be present
  MOD_RES (25)..(29): Variable amino acid
  MOD_RES (31)..(36): Variable amino acid
  MOD_RES (37)..(39): Variable amino acid that may or may not be present
  MOD_RES (40)..(42): Variable amino acid
  MOD_RES (44)..(44): Variable amino acid that may or may not be present
  MOD_RES (45)..(48): Variable amino acid
CSVTCGXGXXXRXRXCXXXXPXXXXXXXXCXXXXXXXXXXXXCXXXXXC

SEQ ID NO: 446 - protein, 38 aa, Artificial Sequence
  Description of Artificial Sequence: Synthetic amino acid sequence
  MOD_RES (2)..(5): Variable amino acid
  MOD_RES (8)..(9): Variable amino acid
  MOD_RES (11)..(18): Variable amino acid
  MOD_RES (20)..(28): Variable amino acid
  MOD_RES (29)..(30): Variable amino acid that may or may not be present
  MOD_RES (32)..(35): Variable amino acid
  MOD_RES (37)..(37): Variable amino acid
CXXXXCCXXCXXXXXXXXCXXXXXXXXXXXCXXXXCXC

SEQ ID NO: 447 - protein, 65 aa, Artificial Sequence
  Description of Artificial Sequence: Synthetic amino acid sequence
  MOD_RES (1)..(1): Variable amino acid
  MOD_RES (3)..(8): Variable amino acid
  MOD_RES (11)..(14): Variable amino acid
  MOD_RES (16)..(19): Variable amino acid
  MOD_RES (20)..(20): Variable amino acid that may or may not be present
  MOD_RES (21)..(23): Variable amino acid
  MOD_RES (25)..(25): Variable amino acid
  MOD_RES (26)..(28): Variable amino acid that may or may not be present
  MOD_RES (29)..(31): Variable amino acid
  MOD_RES (34)..(35): Variable amino acid
  MOD_RES (37)..(44): Variable amino acid
  MOD_RES (46)..(56): Variable amino acid
  MOD_RES (58)..(64): Variable amino acid
XCXXXXXXCCXXXXCXXXXXXXXCXXXXXXXCCXXCXXXXXXXXCXXXXXXXXXXXCXXXXXXXC

SEQ ID NO: 448 - protein, 78 aa, Artificial Sequence
  Description of Artificial Sequence: Synthetic amino acid sequence
  MOD_RES (1)..(10): Variable amino acid
  MOD_RES (12)..(12): Variable amino acid
  MOD_RES (14)..(17): Variable amino acid
  MOD_RES (19)..(21): Variable amino acid
  MOD_RES (24)..(27): Variable amino acid
  MOD_RES (29)..(32): Variable amino acid
  MOD_RES (33)..(33): Variable amino acid that may or may not be present
  MOD_RES (34)..(36): Variable amino acid
  MOD_RES (38)..(38): Variable amino acid
  MOD_RES (39)..(41): Variable amino acid that may or may not be present
  MOD_RES (42)..(44): Variable amino acid
  MOD_RES (47)..(48): Variable amino acid
  MOD_RES (50)..(57): Variable amino acid
  MOD_RES (59)..(69): Variable amino acid
  MOD_RES (71)..(77): Variable amino acid
XXXXXXXXXXCXCXXXXCXXXCCXXXXCXXXXXXXXCXXXXXXXCCXXCXXXXXXXXCXXXXXXXXXXXCXXXXXXXC

SEQ ID NO: 449 - protein, 57 aa, Artificial Sequence
  Description of Artificial Sequence: Synthetic amino acid sequence
  MOD_RES (3)..(6): Variable amino acid
  MOD_RES (8)..(11): Variable amino acid
  MOD_RES (12)..(12): Variable amino acid that may or may not be present
  MOD_RES (13)..(15): Variable amino acid
  MOD_RES (17)..(17): Variable amino acid
  MOD_RES (18)..(20): Variable amino acid that may or may not be present
  MOD_RES (21)..(23): Variable amino acid
  MOD_RES (26)..(27): Variable amino acid
  MOD_RES (29)..(36): Variable amino acid
  MOD_RES (38)..(48): Variable amino acid
  MOD_RES (50)..(56): Variable amino acid
CCXXXXCXXXXXXXXCXXXXXXXCCXXCXXXXXXXXCXXXXXXXXXXXCXXXXXXXC

SEQ ID NO: 450 - protein, 55 aa, Artificial Sequence
  Description of Artificial Sequence: Synthetic amino acid sequence
  MOD_RES (2)..(7): Variable amino acid
  MOD_RES (9)..(13): Variable amino acid
  MOD_RES (16)..(23): Variable amino acid
  MOD_RES (26)..(31): Variable amino acid
  MOD_RES (34)..(38): Variable amino acid
  MOD_RES (41)..(45): Variable amino acid
  MOD_RES (47)..(52): Variable amino acid
  MOD_RES (54)..(55): Variable amino acid
CXXXXXXCXXXXXCCXXXXXXXXCCXXXXXXCCXXXXXCCXXXXXCXXXXXXCXX

SEQ ID NO: 451 - protein, 84 aa, Tenebrio molitor
QCTGGADCTSCTGACTGCGNCPNAVTCTNSQHCVKANTCTGSTDCNTAQTCTNSKDCFEANTCTDSTNCYKATACTNSSGCPGH

SEQ ID NO: 452 - protein, 33 aa, Artificial Sequence
  Description of Artificial Sequence: Synthetic amino acid sequence
  MOD_RES (2)..(4): Variable amino acid
  MOD_RES (6)..(8): Variable amino acid
  MOD_RES (10)..(15): Variable amino acid
  MOD_RES (18)..(20): Variable amino acid
  MOD_RES (22)..(24): Variable amino acid
  MOD_RES (26)..(32): Variable amino acid
CXXXCXXXCXXXXXXCCXXXCXXXCXXXXXXXC

SEQ ID NO: 453 - protein, 17 aa, Artificial Sequence
  Description of Artificial Sequence: Synthetic amino acid sequence
  MOD_RES (2)..(4): Variable amino acid
  MOD_RES (6)..(8): Variable amino acid
  MOD_RES (10)..(16): Variable amino acid
CXXXCXXXCXXXXXXXC

SEQ ID NO: 454 - protein, 5 aa, Artificial Sequence
  Description of Artificial Sequence: Synthetic amino acid sequence
  MOD_RES (2)..(2): Variable amino acid
  MOD_RES (4)..(4): Variable amino acid
CXCXC

SEQ ID NO: 455 - protein, 18 aa, Artificial Sequence
  Description of Artificial Sequence: Synthetic amino acid sequence
  MOD_RES (2)..(3): Variable amino acid
  MOD_RES (5)..(7): Variable amino acid
  MOD_RES (9)..(10): Variable amino acid
  MOD_RES (12)..(14): Variable amino acid
  MOD_RES (16)..(17): Variable amino acid
CXXCXXXCXXCXXXCXXC

SEQ ID NO: 456 - protein, 13 aa, Artificial Sequence
  Description of Artificial Sequence: Synthetic amino acid sequence
  MOD_RES (2)..(4): Variable amino acid
  MOD_RES (6)..(8): Variable amino acid
  MOD_RES (10)..(12): Variable amino acid
CXXXCXXXCXXXC

SEQ ID NO: 457 - protein, 25 aa, Artificial Sequence
  Description of Artificial Sequence: Synthetic amino acid sequence
CKGKGAKCSRLMYDCCTGSCRSGKC

SEQ ID NO: 458 - protein, 61 aa, Artificial Sequence
  Description of Artificial Sequence: Synthetic amino acid sequence
LECHNQQSSQPPTTKTCPGETNCYKKVWRDHRGTIIERGCGCPTVKPGIKLNCCTTDKCNN

SEQ ID NO: 459 - protein, 77 aa, Artificial Sequence
  Description of Artificial Sequence: Synthetic amino acid sequence
LQCYNCPNPTADCKTAVNCSSDFDACLITKAGLQVYNKCWKFEHCNFNDVTTRLRENELTYYCCKKDLCNFNEQLEN

SEQ ID NO: 460 - protein, 21 aa, Tachypleus tridentatus
CPKGLHYNAYLKVCDWPSKAG

SEQ ID NO: 461 - protein, 21 aa, Anopheles gambiae
CPPGTLFDPALHICNWADQVK

SEQ ID NO: 462 - protein, 21 aa, Marsupenaeus japonicus
CPAGTVWNQAIKACDWPANVD

SEQ ID NO: 463 - protein, 19 aa, Chelonus sp.
CPQGLCFNPANNYCDWPSQ

SEQ ID NO: 464 - protein, 21 aa, Lucilia cuprina
CPDGYLYNNKLGICDSPANVK

SEQ ID NO: 465 - protein, 21 aa, Trichoplusia ni
CPGNLHFSPATQSCESPVTAG

SEQ ID NO: 466 - protein, 21 aa, Hevea brasiliensis
CPNNLCCSQWGWCGSTDEYCS

SEQ ID NO: 467 - protein, 21 aa, Amaranthus albus
CPSGMCCSQFGYCGKGPKYCG

SEQ ID NO: 468 - protein, 21 aa, Triticum aestivum
CPNNLCCSQYGYCGMGGDYCG

SEQ ID NO: 469 - protein, 21 aa, Triticum aestivum
CPNNNCCSQYGHCGFGAEYCG

SEQ ID NO: 470 - protein, 21 aa, Triticum aestivum
CPNNLCCSQWGFCGLGSEFCG

SEQ ID NO: 471 - protein, 21 aa, Triticum aestivum
CTNNYCCSQWGSCGIGPGYCG

SEQ ID NO: 472 - protein, 37 aa, Bunodosoma granulifera
VCRDWFKETACRHAKSLGNCRTSQKYRANCAKTCELC

SEQ ID NO: 473 - protein, 35 aa, Stichodactyla helianthus
RSCIDTIPKSRCTAFQCKHSMKYRLSFCRKTCGTC

SEQ ID NO: 474 - protein, 40 aa, Viridovipera stejnegeri
PCTRENKFTNCNTMVQQSSCQDNYMKTNCPASCFCQNKII

SEQ ID NO: 475 - protein, 40 aa, Pseudechis australis
PCKRNNDFSNCKSLAKKSKCQTEWIKKKCPASCFCHNKII

SEQ ID NO: 476 - protein, 40 aa, Pseudechis porphyriacus
PCNYNNDFSNCKSLAKKSKCQTEWIKKKCPASCFCHNKII

SEQ ID NO: 477 - protein, 39 aa, Heloderma horridum
PCKQNDVYNNCPDLKKQVGCGHPIMKDCMATCKCLTEIK

SEQ ID NO: 478 - protein, 46 aa, Artificial Sequence
  Description of Artificial Sequence: Synthetic amino acid sequence
ALAEGQSCGVYTERCAQGLRCLPRQDEEKPLHALLHGRGVCLNEKS

SEQ ID NO: 479 - protein, 37 aa, Artificial Sequence
  Description of Artificial Sequence: Synthetic amino acid sequence
ASCNGVCSPFEMPPCGTSACRCIPVGLVIGYCRNPSG

SEQ ID NO: 480 - protein, 106 aa, Artificial Sequence
  Description of Artificial Sequence: Synthetic amino acid sequence
PKPAACRCSRQDPKNRVNCGFPGITSDQCFTSGCCFDSQVPGVPWCFKPLPAQESEECVMQVSARKNCGYPGISPEDCAARNCCFSDTIPEVPWCFFPMSVEDCHY

SEQ ID NO: 481 - protein, 62 aa, Artificial Sequence
  Description of Artificial Sequence: Synthetic amino acid sequence
TKSTTTACCDFCPCTRSIPPQCQCTDVREKCHSACKSCLCTRSFPPQCRCYDITDFCYPSCS

SEQ ID NO: 482 - protein, 80 aa, Artificial Sequence
  Description of Artificial Sequence: Synthetic amino acid sequence
LRQCLPCGPGGKGRCFGPSICCGDELGCFVGTAEALRCQEENYLPSPCQSGQKPCGSGGRCAAAGICCNDESCVTEPECR

SEQ ID NO: 483 - protein, 593 aa, Homo sapiens
  MOD_RES (119)..(120): Illegible amino acid
  MOD_RES (175)..(180): Illegible amino acid
  MOD_RES (238)..(240): Illegible amino acid
  MOD_RES (300)..(300): Illegible amino acid
  MOD_RES (355)..(360): Illegible amino acid
  MOD_RES (417)..(420): Illegible amino acid
  MOD_RES (477)..(480): Illegible amino acid
  MOD_RES (537)..(540): Illegible amino acid
MWTLVSWVALTAGLVAGTRCPDGQFCPVACCLDPGGASYSCCRPLLDKWPTTLSRHLGGPCQVDAHCSAGHSCIFTVSGTSSCCPFPEAVACGDGHHCCPRGFHCSADGRSCFQRSGNXXVGAIQCPDSQFECPDFSTCCVMVDGSWGCCPMPQASCCEDRVHCCPHGAFCDLVXXXXXXPTGTHPLAKKLPAGRTNRAVALSSSVMCPDARSRCPDGSTCCELPSGKYGCCPMPNAXXXSDHLHCCPQDTVCDLIQSKCLSKENATTDLLTKLPAHTVGDVKCDMEVSCPDGYTCCRLXSGAWGCCPFTGAVCCEDHIHCCPAGFTCDTQKGTCEQGPHQVPWMEKAPAHLSPXXXXXXKRDVPCDNVSSCPSSDTCCQLTSGEWGCCPIPEAVCCSDHQHCCPQRYTCVAEGQCXXXXEIVAGLEKMPARRGSLSHPRDIGCDQHTSCPVGGTCCPSQGGSWACCQLPHAVCCEXXXXCCPAGYTCNVKARSCEKEVVSAQPATFLARSPHVGVKDVECGEGHFCHDNQTCCRDXXXXWACCPYAQGVCCADRRHCCPAGFRCARRGTKCLRREAPRWDAPLRDPALRQLL

SEQ ID NO: 484 - protein, 419 aa, Homo sapiens
MHLLGFFSVACSLLAAALLPGPREAPAAAAAFESGLDLSDAEPDAGEATAYASKDLEEQLRSVSSVDELMTVLYPEYWKMYKCQLRKGGWQHNREQANLNSRTEETIKFAAAHYNTEILKSIDNEWRKTQCMPREVCIDVGKEFGVATNTFFKPPCVSVYRCGGCCNSEGLQCMNTSTSYLSKTLFEITVPLSQGPKPVTISFANHTSCRCMSKLDVYRQVHSIIRRSLPATLPQCPAANKTCPTNYMWNNHICRCLAQEDFMFSSDAGDDSTDGFHDICGPNKELDEETCQCVCRAGLRPASCGPHKELDRNSCQCVCKNKLFPSQCGANREFDENTCQCVCKRTCPRNQPLNPGKCACECTESPQKCLLKGKKFHHQTCSCYRRPCTNRQKACEPGFSYSEEVCRCVPSYWKRPQMS

SEQ ID NO: 485 - protein, 1700 aa, Chironomus tentans
MKTLSSLLLVLAVNVLLIQASPDPDNRCPARKYWNERKQACVCKRENRCYPIGAIFDPESCTFSMCQSKGCSAKQIFNKDKCACECRNDQPKDGCGAGRYWCNQDCSCKCSTPMSAGGCSGSQIWCEKSCACVCPNADKCTAPQVWNKDTCCCGCPVNMQEPADGCTKPLIWDKVDCRCECPLKKDCGKNRDWSDSSCSCECKGDGKCQGSKIWCKNNCRCICPTAEPAGGCSAPLKWDDDKCSCACPAKMEEKKEKCVESGKIWNPNTCECGCAQLNCPDNKKANKETCQCECKEVKKCNGGQVFCKDSCSCVCPGGDKDKTCTAPQVYDGVACSCSCPVNMQKPADGCPRPQKWDKEECRCECPVKHDCKNGKVWDETICQCICPRDAPVCTAGKERCGESCECKCINREPKEGCAKPLVWNENTCKCVCPADKQMSPGGCGSGKSFNKLTCQCECDQSASKCGLKRWNADTCKCECQPGMPPEGCGKQTWISDKCKCECSPTITCQAPQILDLNTCECKCPVNMLAQKEKCKSPRQWTDSKCLCECSTTPATCEGKQTWCGEACQCICPGGDKNCGNKKFFDKPSCECKCKNNPTCTSPQVWDADDCECKCPKDKQKPQGGCDGGQKWNDRVCSCGCPVPRPDCTNGQIYNINTCACGCGIDKPSCPKQQIYNWKTCDCECPNGMKEPVGGCGAKTWLDDECQCDCVPGKPKGGCTGAQKWCDKTCKCKCEKEMPTGGCENNKKWCDETCDCVCPQKNTCIAPKVWDAKTCSCICVNPPKCNSPQVLKDTCCCGCQNVKSCKAPQKFIENICDCACPNKKQCKAPLVWSDEFCDCVCPNSASMKTCLSPKEWNKVTCTCDCNPPKPDCCPGTQKWMDDKCKCGCPNAQTDCAGGKKFNDFTCSCGCPSGKLDCTGNTKWSAETCTCGCGDVNRNCGNLKNFNDNLCQCECKNKQEMANCKSPRTWNYDTCKCVCKNADDSDDCVKPQIWLDDQCKCGCPASAQMTCPANKRFIEKSCSCECKSPMPSPIPQGKKWNEDKCVVECANVKTCEGPQRWCDNQCKCICPQVNTKCSDKQKFIESKCECGCETQTQCKDGFRWSNLECGCLCDDKKCPGKQVFDKNTCQCKCPNQKPGDTCGNGKDFCPLDCSCKCKNPKPANGCTGVQEWNEEKCQCECPKDKPKKQCPGGQDWNNHQCQCGCPTPAPTCSNNQKYSNVSCSCGCNPGKPKNGCPGNQIWCDNTCRCVCPKNMEKPADNCKTKWWNDEMCQCVCKPGCPEGGCKGVMKWNANTCSCECPADKAKPASCGDKKSWNDDSCSCQCKSKMPCGGCPPNQQWNEKDCECKCSATGNCPAGQTWNSQTCQCSCPATGKCTGAQVWCSKACKCVCPAQKKCDSPKTWDENSCSCQCPKNMRPPTGGCNAGRTWDDATCSEKCAATPKCDSPKVFDPTTCGCKCGNKPNKLDAGRTWDEQKCKMTCDLPAIPCCHYEGQVYDSNTCKCGCPKEETCKQGFSFSPKSGCKCILECNKKDPGCGAKKIWCQETCKCECASEPPRMGCGPNRYWDKEDCACQCLKTKVCTDSDFSFFSHDTCDCECSNAKDFILNCNQKLNKVSCQPQCIQRPPPEGCAEKFGEFFSWDPKACECKCIEQKTTVKGRVFDKATCNFKCTNEPKTNPKCANTAESWDSQICACKVCSTCKH

SEQ ID NO: 486 - protein, 540 aa, Paramecium primaurelia
MNNKFIIFSLLLALVASQTYSLTSCTCAQLLSEGDCIKNVSLGCSWDTTKKTCGVSTTPVTPTVTYAAYCDTFAETDCPKAKPCTDCGNYAACAWVESKCTFFTGCTPFAKTLDSECQAISNRCITDGTHCVEVDACSTYKKQLPCAKNAAGSLCYWDTTNNTCVDANTCDKLPATFATDKDCRDVISTCTTKTGGGCVDSGNNCSDQTLEIQCVWNKLKTTSCYWDGAACKDRICDNAPTSLTTDDACKTFRTDGTCTTKANGGCVTRTTCAAATIQASCIKNSSGGDCYWTGTACVDKACANTPTTIATNSACAGFVTGCITKSGGGCVVNGACSVANVQAACVKNPSNFDCIWDTTCKEKTCANASTTNNTHDLCTSYLSTCTVKSGGGCQNRTCANAPTTMTTNDACEAYFTGNNCITKSGGGCVTNTTCAAITLEAACVKNSSGSTCFWDTASSSCKDKTCVNAPATNTTHDLCQPFLNTCTVNSTSAGCVEKTCENSLVLAICDKDTSSRACIWKGKCYKKQCVLASSATTTHA

SEQ ID NO: 487 - protein, 350 aa, Caenorhabditis elegans
MGRSNSLRLLFLFCLLLALSTAASRRLKRQCGCSNFCNCQQQPVFFAQISLPACSCQQAPICQPQCPRAEINSDCSATCVRACIPSCSKSTGNTFACSTTCESTCDKTCASAAQQAMSHIQVSPPNPQPLVPIAAAPTVDDSCQNVCQNVCQGACVSQNSPPAVCQQTCRQSCQFGCATNEQLPTTSSTSTNAPTIKITLNINDAYFDSNCAPKCTQSCHSQCISQGNPAASCSNSCNTECSDKCSTRPVQAQVQQIQPQQVQITIPQTCQSRCENRCLSTCTASQPSVCAPSCSTACQLSCDSIGAATAPQSTNPTPVEVRALCTPTCMPQCLPSCTATTTTTTTQTPY

SEQ ID NO: 488 - protein, 55 aa, Artificial Sequence
  Description of Artificial Sequence: Synthetic amino acid sequence
VESCEQYTSCGECLGSGDPHCGWCVLENRCTRRSDCQRAEEPNRWASSISQCVKL

SEQ ID NO: 489 - protein, 47 aa, Artificial Sequence
  Description of Artificial Sequence: Synthetic amino acid sequence
GPGCRHFLTCSMCLRAPRFMGCGWCGGVCSRQHECDGGWWQDSCPPP

SEQ ID NO: 490 - protein, 58 aa, Artificial Sequence
  Description of Artificial Sequence: Synthetic amino acid sequence
  MOD_RES (1)..(3): Variable amino acid
  MOD_RES (5)..(10): Variable amino acid
  MOD_RES (12)..(16): Variable amino acid
  MOD_RES (19)..(26): Variable amino acid
  MOD_RES (29)..(34): Variable amino acid
  MOD_RES (37)..(41): Variable amino acid
  MOD_RES (44)..(48): Variable amino acid
  MOD_RES (50)..(55): Variable amino acid
  MOD_RES (57)..(58): Variable amino acid
XXXCXXXXXXCXXXXXCCXXXXXXXXCCXXXXXXCCXXXXXCCXXXXXCXXXXXXCXX

SEQ ID NO: 491 - protein, 20 aa, Artificial Sequence
  Description of Artificial Sequence: Synthetic amino acid sequence
  MOD_RES (3)..(10): This region may encompass 5 to 8 variable amino acid residues
  MOD_RES (13)..(20): This region may encompass 5 to 8 variable amino acid residues
CCXXXXXXXXCCXXXXXXXX

SEQ ID NO: 492 - protein, 17 aa, Artificial Sequence
  Description of Artificial Sequence: Synthetic amino acid sequence
  MOD_RES (2)..(6): Variable amino acid
  MOD_RES (9)..(16): This region may encompass 5 to 8 variable amino acid residues
CXXXXXCCXXXXXXXXC

SEQ ID NO: 493 - protein, 20 aa, Artificial Sequence
  Description of Artificial Sequence: Synthetic amino acid sequence
  MOD_RES (1)..(8): This region may encompass 5 to 8 variable amino acid residues
  MOD_RES (11)..(18): This region may encompass 5 to 8 variable amino acid residues
XXXXXXXXCCXXXXXXXXCC

SEQ ID NO: 494 - protein, 25 aa, Artificial Sequence
  Description of Artificial Sequence: Synthetic amino acid sequence
QCTGGADCTSCTGACTGCGNCPNAV

SEQ ID NO: 495 - protein, 25 aa, Artificial Sequence
  Description of Artificial Sequence: Synthetic amino acid sequence
QCTGGADCTSCTGACTGCGNCPNAV

SEQ ID NO: 496 - protein, 41 aa, Artificial Sequence
  Description of Artificial Sequence: Synthetic amino acid sequence
QCTGGADCTSCTGACTGCGDCTSCTGACTGCGDCTSCTGAC

SEQ ID NO: 497 - protein, 41 aa, Artificial Sequence
  Description of Artificial Sequence: Synthetic amino acid sequence
QCTGGADCTSCTGACTGCGADCTSCTGACTGCGADCTSCTG

SEQ ID NO: 498 - protein, 155 aa, Artificial Sequence
  Description of Artificial Sequence: Synthetic amino acid sequence
  MOD_RES (2)..(11): This region may encompass 0 to 10 variable amino acid residues
  MOD_RES (13)..(22): This region may encompass 0 to 10 variable amino acid residues
  MOD_RES (24)..(33): This region may encompass 0 to 10 variable amino acid residues
  MOD_RES (35)..(44): This region may encompass 0 to 10 variable amino acid residues
  MOD_RES (46)..(55): This region may encompass 0 to 10 variable amino acid residues
  MOD_RES (57)..(66): This region may encompass 0 to 10 variable amino acid residues
  MOD_RES (68)..(77): This region may encompass 0 to 10 variable amino acid residues
  MOD_RES (79)..(88): This region may encompass 0 to 10 variable amino acid residues
  MOD_RES (90)..(99): This region may encompass 0 to 10 variable amino acid residues
  MOD_RES (101)..(110): This region may encompass 0 to 10 variable amino acid residues
  MOD_RES (112)..(121): This region may encompass 0 to 10 variable amino acid residues
  MOD_RES (123)..(132): This region may encompass 0 to 10 variable amino acid residues
  MOD_RES (134)..(143): This region may encompass 0 to 10 variable amino acid residues
  MOD_RES (145)..(154): This region may encompass 0 to 10 variable amino acid residues
CXXXXXXXXXXCXXXXXXXXXXCXXXXXXXXXXCXXXXXXXXXXCXXXXXXXXXXCXXXXXXXXXXCXXXXXXXXXXCXXXXXXXXXXCXXXXXXXXXXCXXXXXXXXXXCXXXXXXXXXXCXXXXXXXXXXCXXXXXXXXXXCXXXXXXXXXXC

SEQ ID NO: 499 - protein, 199 aa, Artificial Sequence
  Description of Artificial Sequence: Synthetic amino acid sequence
  MOD_RES (2)..(11): This region may encompass 0 to 10 variable amino acid residues
  MOD_RES (13)..(22): This region may encompass 0 to 10 variable amino acid residues
  MOD_RES (24)..(33): This region may encompass 0 to 10 variable amino acid residues
  MOD_RES (35)..(44): This region may encompass 0 to 10 variable amino acid residues
  MOD_RES (46)..(55): This region may encompass 0 to 10 variable amino acid residues
  MOD_RES (57)..(66): This region may encompass 0 to 10 variable amino acid residues
  MOD_RES (68)..(77): This region may encompass 0 to 10 variable amino acid residues
  MOD_RES (79)..(88): This region may encompass 0 to 10 variable amino acid residues
  MOD_RES (90)..(99): This region may encompass 0 to 10 variable amino acid residues
  MOD_RES (101)..(110): This region may encompass 0 to 10 variable amino acid residues
  MOD_RES (112)..(121): This region may encompass 0 to 10 variable amino acid residues
  MOD_RES (123)..(132): This region may encompass 0 to 10 variable amino acid residues
  MOD_RES (134)..(143): This region may encompass 0 to 10 variable amino acid residues
  MOD_RES (145)..(154): This region may encompass 0 to 10 variable amino acid residues
  MOD_RES (156)..(165): This region may encompass 0 to 10 variable amino acid residues
  MOD_RES (167)..(176): This region may encompass 0 to 10 variable amino acid residues
  MOD_RES (178)..(187): This region may encompass 0 to 10 variable amino acid residues
  MOD_RES (189)..(198): This region may encompass 0 to 10 variable amino acid residues
CXXXXXXXXXXCXXXXXXXXXXCXXXXXXXXXXCXXXXXXXXXXCXXXXXXXXXXCXXXXXXXXXXCXXXXXXXXXXCXXXXXXXXXXCXXXXXXXXXXCXXXXXXXXXXCXXXXXXXXXXCXXXXXXXXXXCXXXXXXXXXXCXXXXXXXXXXCXXXXXXXXXXCXXXXXXXXXXCXXXXXXXXXXCXXXXXXXXXXC

SEQ ID NO: 500 - protein, 12 aa, Artificial Sequence
  Description of Artificial Sequence: Synthetic amino acid sequence
  MOD_RES (2)..(2): Variable amino acid
  MOD_RES (4)..(4): Variable amino acid
  MOD_RES (6)..(6): Variable amino acid
  MOD_RES (8)..(8): Variable amino acid
  MOD_RES (10)..(10): Variable amino acid
  MOD_RES (12)..(12): Variable amino acid
CXCXCXCXCXCX

SEQ ID NO: 501 - protein, 30 aa, Artificial Sequence
  Description of Artificial Sequence: Synthetic amino acid sequence
  MOD_RES (2)..(9): This region may encompass 3 to 8 variable amino acid residues
  MOD_RES (12)..(19): This region may encompass 3 to 8 variable amino acid residues
  MOD_RES (22)..(29): This region may encompass 3 to 8 variable amino acid residues
CXXXXXXXXCCXXXXXXXXCCXXXXXXXXC

SEQ ID NO: 502 - protein, 19 aa, Artificial Sequence
  Description of Artificial Sequence: Synthetic amino acid sequence
  MOD_RES (2)..(5): Variable amino acid
  MOD_RES (8)..(11): Variable amino acid
  MOD_RES (14)..(17): Variable amino acid
CXXXXCCXXXXCCXXXXCC

SEQ ID NO: 503 - protein, 46 aa, Artificial Sequence
  Description of Artificial Sequence: Synthetic amino acid sequence
  MOD_RES (2)..(9): This region may encompass 3 to 8 variable amino acid residues
  MOD_RES (11)..(18): This region may encompass 3 to 8 variable amino acid residues
  MOD_RES (21)..(28): This region may encompass 3 to 8 variable amino acid residues
  MOD_RES (30)..(37): This region may encompass 3 to 8 variable amino acid residues
  MOD_RES (39)..(46): This region may encompass 3 to 8 variable amino acid residues
CXXXXXXXXCXXXXXXXXCCXXXXXXXXCXXXXXXXXCXXXXXXXX

SEQ ID NO: 504 - protein, 22 aa, Artificial Sequence
  Description of Artificial Sequence: Synthetic amino acid sequence
  MOD_RES (2)..(3): Variable amino acid
  MOD_RES (5)..(8): Variable amino acid
  MOD_RES (11)..(12): Variable amino acid
  MOD_RES (14)..(17): Variable amino acid
  MOD_RES (20)..(21): Variable amino acid
CXXCXXXXCCXXCXXXXCCXXC

SEQ ID NO: 505 - protein, 37 aa, Artificial Sequence
  Description of Artificial Sequence: Synthetic amino acid sequence
  MOD_RES (1)..(2): Variable amino acid
  MOD_RES (4)..(7): Variable amino acid
  MOD_RES (9)..(12): Variable amino acid
  MOD_RES (14)..(17): Variable amino acid
  MOD_RES (19)..(22): Variable amino acid
  MOD_RES (24)..(27): Variable amino acid
  MOD_RES (29)..(32): Variable amino acid
  MOD_RES (34)..(37): Variable amino acid
XXCXXXXCXXXXCXXXXCXXXXCXXXXCXXXXCXXXX

SEQ ID NO: 506 - protein, 53 aa, Artificial Sequence
  Description of Artificial Sequence: Synthetic amino acid sequence
  MOD_RES (1)..(2): Variable amino acid
  MOD_RES (4)..(7): Variable amino acid
  MOD_RES (9)..(12): Variable amino acid
  MOD_RES (14)..(17): Variable amino acid
  MOD_RES (19)..(22): Variable amino acid
  MOD_RES (24)..(27): Variable amino acid
  MOD_RES (29)..(32): Variable amino acid
  MOD_RES (34)..(37): Variable amino acid
  MOD_RES (39)..(42): Variable amino acid
  MOD_RES (44)..(47): Variable amino acid
  MOD_RES (49)..(52): Variable amino acid
XXCXXXXCXXXXCXXXXCXXXXCXXXXCXXXXCXXXXCXXXXCXXXXCXXXXC

SEQ ID NO: 507 - protein, 106 aa, Sus scrofa; identical to SEQ ID NO: 480

SEQ ID NO: 508 - protein, 16 aa, Artificial Sequence
  Description of Artificial Sequence: Synthetic amino acid sequence
  MOD_RES (2)..(5): Variable amino acid
  MOD_RES (7)..(10): Variable amino acid
  MOD_RES (12)..(15): Variable amino acid
CXXXXCXXXXCXXXXC

SEQ ID NO: 509 - protein, 20 aa, Artificial Sequence
  Description of Artificial Sequence: Synthetic amino acid sequence
  MOD_RES (1)..(2): Variable amino acid
  MOD_RES (4)..(7): Variable amino acid
  MOD_RES (9)..(12): Variable amino acid
  MOD_RES (14)..(17): Variable amino acid
  MOD_RES (19)..(20): Variable amino acid
XXCXXXXCXXXXCXXXXCXX

SEQ ID NO: 510 - protein, 16 aa, Artificial Sequence
  Description of Artificial Sequence: Synthetic amino acid sequence
  MOD_RES (2)..(5): Variable amino acid
  MOD_RES (7)..(10): Variable amino acid
  MOD_RES (12)..(15): Variable amino acid
CXXXXCXXXXCXXXXC

SEQ ID NO: 511 - protein, 36 aa, Artificial Sequence
  Description of Artificial Sequence: Synthetic amino acid sequence
  MOD_RES (2)..(5): Variable amino acid
  MOD_RES (7)..(10): Variable amino acid
  MOD_RES (12)..(15): Variable amino acid
  MOD_RES (17)..(20): Variable amino acid
  MOD_RES (22)..(25): Variable amino acid
  MOD_RES (27)..(30): Variable amino acid
  MOD_RES (32)..(35): Variable amino acid
CXXXXCXXXXCXXXXCXXXXCXXXXCXXXXCXXXXC

SEQ ID NO: 512 - protein, 56 aa, Artificial Sequence
  Description of Artificial Sequence: Synthetic amino acid sequence
  MOD_RES (2)..(5): Variable amino acid
  MOD_RES (7)..(10): Variable amino acid
  MOD_RES (12)..(15): Variable amino acid
  MOD_RES (17)..(20): Variable amino acid
  MOD_RES (22)..(25): Variable amino acid
  MOD_RES (27)..(30): Variable amino acid
  MOD_RES (32)..(35): Variable amino acid
  MOD_RES (37)..(40): Variable amino acid
  MOD_RES (42)..(45): Variable amino acid
  MOD_RES (47)..(50): Variable amino acid
  MOD_RES (52)..(55): Variable amino acid
CXXXXCXXXXCXXXXCXXXXCXXXXCXXXXCXXXXCXXXXCXXXXCXXXXCXXXXC

SEQ ID NO: 513 - protein, 121 aa, Artificial Sequence
  Description of Artificial Sequence: Synthetic amino acid sequence
DANPCGSYCPSVCAPACAPVCCYPPPPPPPPPPPPPPPPPPPPPPPAPLPGNPGPPGRPGPPGAPGPAGPPGLPGPPGPPGAPGQGGLPGQPAPPPPPCPPVCVAQCVPTCPQYCCPAKRK

SEQ ID NO: 514 - protein, 80 aa, Artificial Sequence
  Description of Artificial Sequence: Synthetic amino acid sequence
PPPPPAPLPGNPGPPGRPGPPGAPGPAGPPGLPGPPGPPGAPGQGGLPGQPAPPPPPCPPVCVACCVPTCRQYCCPAKRK

SEQ ID NO: 515 - protein, 77 aa, Artificial Sequence
  Description of Artificial Sequence: Synthetic amino acid sequence
DANPCGSYCPSVCARACAPVCCYPPPPPPPPPPPPPPPPPPPPPPPAPLPGNPGPPGRPGPPGAPGPAGPPGLPGPP

SEQ ID NO: 516 - protein, 18 aa, Artificial Sequence
  Description of Artificial Sequence: Synthetic amino acid sequence
CGSYCPSVCAPACAPVCC

SEQ ID NO: 517 - protein, 18 aa, Artificial Sequence
  Description of Artificial Sequence: Synthetic amino acid sequence
CPPVCVAQCVPTCPQYCC

SEQ ID NO: 518 - protein, 16 aa, Artificial Sequence
  Description of Artificial Sequence: Synthetic amino acid sequence
  MOD_RES (2)..(5): Variable amino acid
  MOD_RES (7)..(10): Variable amino acid
  MOD_RES (12)..(15): Variable amino acid
CXXXXCXXXXCXXXXC

SEQ ID NO: 519 - protein, 9 aa, Artificial Sequence
  Description of Artificial Sequence: Synthetic amino acid sequence
  MOD_RES (3)..(4): Variable amino acid
CCXXFCCCC

SEQ ID NO: 520 - protein, 10 aa, Artificial Sequence
  Description of Artificial Sequence: Synthetic amino acid sequence
  MOD_RES (3)..(5): Variable amino acid
  MOD_RES (8)..(8): Variable amino acid
CCXXXCCXCC

SEQ ID NO: 521 - protein, 11 aa, Artificial Sequence
  Description of Artificial Sequence: Synthetic amino acid sequence
  MOD_RES (2)..(2): Variable amino acid
  MOD_RES (4)..(6): Variable amino acid
  MOD_RES (9)..(9): Variable amino acid
CXCXXXCCXCC

SEQ ID NO: 522 - protein, 14 aa, Artificial Sequence
  Description of Artificial Sequence: Synthetic amino acid sequence
  MOD_RES (2)..(2): Variable amino acid
  MOD_RES (4)..(5): Variable amino acid
  MOD_RES (10)..(11): Variable amino acid
CXCXXHCDCXXTCC

SEQ ID NO: 523 - protein, 17 aa, Artificial Sequence
  Description of Artificial Sequence: Synthetic amino acid sequence
  MOD_RES (2)..(3): Variable amino acid
  MOD_RES (5)..(8): Variable amino acid
  MOD_RES (10)..(10): Variable amino acid
  MOD_RES (14)..(14): Variable amino acid
CXXCXXXXCXWCSXSCC

SEQ ID NO: 524 - protein, 21 aa, Artificial Sequence
  Description of Artificial Sequence: Synthetic amino acid sequence
  MOD_RES (2)..(2): Variable amino acid
  MOD_RES (4)..(4): Variable amino acid
  MOD_RES (7)..(9): Variable amino acid
  MOD_RES (11)..(13): Variable amino acid
  MOD_RES (16)..(18): Variable amino acid
  MOD_RES (20)..(20): Variable amino acid
CXEXCVXXXCXXXGCXXXCXC

SEQ ID NO: 525 - protein, 24 aa, Artificial Sequence
  Description of Artificial Sequence: Synthetic amino acid sequence
  MOD_RES (2)..(5): Variable amino acid
  MOD_RES (9)..(11): Variable amino acid
  MOD_RES (13)..(14): Variable amino acid
  MOD_RES (16)..(16): Variable amino acid
  MOD_RES (19)..(21): Variable amino acid
  MOD_RES (23)..(23): Variable amino acid
CXXXXCPYXXXCXXRXCNXXXCXC

SEQ ID NO: 526 - protein, 27 aa, Artificial Sequence
  Description of Artificial Sequence: Synthetic amino acid sequence
  MOD_RES (3)..(3): Variable amino acid
  MOD_RES (8)..(9): Variable amino acid
  MOD_RES (11)..(12): Variable amino acid
  MOD_RES (15)..(19): Variable amino acid
  MOD_RES (23)..(24): Variable amino acid
  MOD_RES (26)..(26): Variable amino acid
CDXGEQCXXPXXCIXXXXXCKPXXCXC

SEQ ID NO: 527 - protein, 29 aa, Artificial Sequence
  Description of Artificial Sequence: Synthetic amino acid sequence
  MOD_RES (2)..(2): Variable amino acid
  MOD_RES (4)..(4): Variable amino acid
  MOD_RES (6)..(6): Variable amino acid
  MOD_RES (9)..(13): Variable amino acid
  MOD_RES (15)..(19): Variable amino acid
  MOD_RES (22)..(23): Variable amino acid
  MOD_RES (25)..(25): Variable amino acid
  MOD_RES (27)..(28): Variable amino acid
CXPXGXPCXXXXXCXXXXXGCXXLXCXXC

SEQ ID NO: 528 - protein, 32 aa, Artificial Sequence
  Description of Artificial Sequence: Synthetic amino acid sequence
  MOD_RES (2)..(4): Variable amino acid
  MOD_RES (6)..(7): Variable amino acid
  MOD_RES (9)..(12): Variable amino acid
  MOD_RES (15)..(21): Variable amino acid
  MOD_RES (24)..(26): Variable amino acid
  MOD_RES (29)..(31): Variable amino acid
CXXXFXXCXXXXDCXXXXXXXCDXXXDCXXXC

SEQ ID NO: 529 - protein, 34 aa, Artificial Sequence
  Description of Artificial Sequence: Synthetic amino acid sequence
  MOD_RES (2)..(7): Variable amino acid
  MOD_RES (9)..(14): Variable amino acid
  MOD_RES (16)..(18): Variable amino acid
  MOD_RES (21)..(22): Variable amino acid
  MOD_RES (24)..(26): Variable amino acid
  MOD_RES (28)..(28): Variable amino acid
  MOD_RES (30)..(33): Variable amino acid
CXXXXXXCXXXXXXCXXXGWXXCXXXFXCXXXXC

SEQ ID NO: 530 - protein, 36 aa, Artificial Sequence
  Description of Artificial Sequence: Synthetic amino acid sequence
  MOD_RES (2)..(5): Variable amino acid
  MOD_RES (7)..(7): Variable amino acid
  MOD_RES (9)..(12): Variable amino acid
  MOD_RES (14)..(14): Variable amino acid
  MOD_RES (16)..(16): Variable amino acid
  MOD_RES (18)..(19): Variable amino acid
  MOD_RES (21)..(21): Variable amino acid
  MOD_RES (23)..(23): Variable amino acid
  MOD_RES (25)..(29): Variable amino acid
  MOD_RES (31)..(35): Variable amino acid
CXXXXGXCXXXXPXCXNXXGXFXCXXXXXCXXXXXC

SEQ ID NO: 531 - protein, 38 aa, Artificial Sequence
  Description of Artificial Sequence: Synthetic amino acid sequence
  MOD_RES (2)..(7): Variable amino acid
  MOD_RES (11)..(14): Variable amino acid
  MOD_RES (16)..(21): Variable amino acid
  MOD_RES (24)..(24): Variable amino acid
  MOD_RES (26)..(26): Variable amino acid
  MOD_RES (28)..(30): Variable amino acid
  MOD_RES (32)..(33): Variable amino acid
  MOD_RES (36)..(36): Variable amino acid
CXXXXXXCFPXXXXCXXXXXXIGXCXWXXXCXXDGXDC

SEQ ID NO: 532 - protein, 39 aa, Artificial Sequence
  Description of Artificial Sequence: Synthetic amino acid sequence
  MOD_RES (2)..(7): Variable amino acid
  MOD_RES (9)..(15): Variable amino acid
  MOD_RES (17)..(22): Variable amino acid
  MOD_RES (25)..(25): Variable amino acid
  MOD_RES (27)..(30): Variable amino acid
  MOD_RES (32)..(32): Variable amino acid
  MOD_RES (34)..(38): Variable amino acid
CXXXXXXCXXXXXXXCXXXXXXGGXCXXXXVXCXXXXXC

SEQ ID NO: 533 - protein, 44 aa, Artificial Sequence
  Description of Artificial Sequence: Synthetic amino acid sequence
  MOD_RES (2)..(8): Variable amino acid
  MOD_RES (10)..(17): Variable amino acid
  MOD_RES (19)..(21): Variable amino acid
  MOD_RES (24)..(25): Variable amino acid
  MOD_RES (27)..(27): Variable amino acid
  MOD_RES (29)..(34): Variable amino acid
  MOD_RES (36)..(37): Variable amino acid
  MOD_RES (39)..(40): Variable amino acid
  MOD_RES (42)..(43): Variable amino acid
CXXXXXXXCXXXXXXXXCXXXERXXGXCXXXXXXCXXGXXGXXC

SEQ ID NO: 534 - protein, 45 aa, Artificial Sequence
  Description of Artificial Sequence: Synthetic amino acid sequence
  MOD_RES (2)..(8): Variable amino acid
  MOD_RES (10)..(17): Variable amino acid
  MOD_RES (19)..(25): Variable amino acid
  MOD_RES (27)..(27): Variable amino acid
  MOD_RES (29)..(35): Variable amino acid
  MOD_RES (37)..(43): Variable amino acid
CXXXXXXXCXXXXXXXXCXXXXXXXGXCXXXXXXXCXXXXXXXWC

SEQ ID NO: 535 - protein, 46 aa, Artificial Sequence
  Description of Artificial Sequence: Synthetic amino acid sequence
  MOD_RES (2)..(6): Variable amino acid
  MOD_RES (8)..(8): Variable amino acid
  MOD_RES (10)..(14): Variable amino acid
  MOD_RES (17)..(17): Variable amino acid
  MOD_RES (19)..(28): Variable amino acid
  MOD_RES (30)..(32): Variable amino acid
  MOD_RES (34)..(36): Variable amino acid
  MOD_RES (38)..(39): Variable amino acid
  MOD_RES (42)..(42): Variable amino acid
  MOD_RES (44)..(45): Variable amino acid
CXXXXXFXCXXXXXNGXCXXXXXXXXXXCXXXGXXXCXXGWXGXXC

SEQ ID NO: 536 - protein, 52 aa, Artificial Sequence
  Description of Artificial Sequence: Synthetic amino acid sequence
  MOD_RES (2)..(4): Variable amino acid
  MOD_RES (8)..(9): Variable amino acid
  MOD_RES (12)..(12): Variable amino acid
  MOD_RES (14)..(14): Variable amino acid
  MOD_RES (17)..(19): Variable amino acid
  MOD_RES (21)..(28): Variable amino acid
  MOD_RES (32)..(40): Variable amino acid
  MOD_RES (43)..(46): Variable amino acid
  MOD_RES (48)..(50): Variable amino acid
CXXXYYGXXCGXPXITXXXCXXXXXXXXGKCXXXXXXXXXCDXXXXLXXXGC

SEQ ID NO: 537 - protein, 56 aa, Artificial Sequence
  Description of Artificial Sequence: Synthetic amino acid sequence
  MOD_RES (2)..(10): Variable amino acid
  MOD_RES (12)..(13): Variable amino acid
  MOD_RES (15)..(17): Variable amino acid
  MOD_RES (19)..(19): Variable amino acid
  MOD_RES (21)..(21): Variable amino acid
  MOD_RES (23)..(27): Variable amino acid
  MOD_RES (29)..(31): Variable amino acid
  MOD_RES (33)..(34): Variable amino acid
  MOD_RES (36)..(38): Variable amino acid
  MOD_RES (40)..(44): Variable amino acid
  MOD_RES (48)..(53): Variable amino acid
CXXXXXXXXXCXXGXXXRXRXCXXXXXDXXXHXXCXXXGXXXXXCFDXXXXXXPWC

SEQ ID NO: 538 - protein, 59 aa, Artificial Sequence
  Description of Artificial Sequence: Synthetic amino acid sequence
  MOD_RES (2)..(4): Variable amino acid
  MOD_RES (6)..(10): Variable amino acid
  MOD_RES (12)..(12): Variable amino acid
  MOD_RES (15)..(23): Variable amino acid
  MOD_RES (25)..(25): Variable amino acid
  MOD_RES (28)..(36): Variable amino acid
  MOD_RES (38)..(46): Variable amino acid
  MOD_RES (48)..(49): Variable amino acid
  MOD_RES (51)..(58): Variable amino acid
CXXXDXXXXXCXDGXXXXXXXXXCXDGXXXXXXXXXCXXXXXXXXXCXXGXXXXXXXXC

SEQ ID NO: 539 - protein, 51 aa, Artificial Sequence
  Description of Artificial Sequence: Synthetic amino acid sequence
  MOD_RES (2)..(9): This region may encompass 0 to 8 variable amino acid residues
  MOD_RES (11)..(20): This region may encompass 3 to 10 variable amino acid residues
  MOD_RES (22)..(31): This region may encompass 0 to 10 variable amino acid residues
  MOD_RES (33)..(40): This region may encompass 0 to 8 variable amino acid residues
  MOD_RES (42)..(50): This region may encompass 0 to 9 variable amino acid residues
CXXXXXXXXCXXXXXXXXXXCXXXXXXXXXXCXXXXXXXXCXXXXXXXXXC

SEQ ID NO: 540 - protein, 43 aa, Artificial Sequence; identical to SEQ ID NO: 263
  Description of Artificial Sequence: Synthetic amino acid sequence
  MOD_RES (2)..(6): Variable amino acid
  MOD_RES (8)..(12): Variable amino acid
  MOD_RES (14)..(18): Variable amino acid
  MOD_RES (20)..(24): Variable amino acid
  MOD_RES (26)..(30): Variable amino acid
  MOD_RES (32)..(36): Variable amino acid
  MOD_RES (38)..(42): Variable amino acid

SEQ ID NO: 541 - protein, 31 aa, Artificial Sequence; identical to SEQ ID NO: 262
  Description of Artificial Sequence: Synthetic amino acid sequence
  MOD_RES (2)..(6): Variable amino acid
  MOD_RES (8)..(12): Variable amino acid
  MOD_RES (14)..(18): Variable amino acid
  MOD_RES (20)..(24): Variable amino acid
  MOD_RES (26)..(30): Variable amino acid

SEQ ID NO: 542 - protein, 62 aa, Artificial Sequence
  Description of Artificial Sequence: Synthetic amino acid sequence
  MOD_RES (2)..(6): Variable amino acid
  MOD_RES (8)..(12): Variable amino acid
  MOD_RES (14)..(18): Variable amino acid
  MOD_RES (20)..(24): Variable amino acid
  MOD_RES (26)..(30): Variable amino acid
  MOD_RES (33)..(37): Variable amino acid
  MOD_RES (39)..(43): Variable amino acid
  MOD_RES (45)..(49): Variable amino acid
  MOD_RES (51)..(55): Variable amino acid
  MOD_RES (57)..(61): Variable amino acid
CXXXXXCXXXXXCXXXXXCXXXXXCXXXXXCCXXXXXCXXXXXCXXXXXCXXXXXCXXXXXC

SEQ ID NO: 543 - protein, 65 aa, Artificial Sequence
  Description of Artificial Sequence: Synthetic amino acid sequence
  MOD_RES (2)..(6): Variable amino acid
  MOD_RES (8)..(12): Variable amino acid
  MOD_RES (14)..(18): Variable amino acid
  MOD_RES (20)..(24): Variable amino acid
  MOD_RES (26)..(30): Variable amino acid
  MOD_RES (36)..(40): Variable amino acid
  MOD_RES (42)..(46): Variable amino acid
  MOD_RES (48)..(52): Variable amino acid
  MOD_RES (54)..(58): Variable amino acid
  MOD_RES (60)..(64): Variable amino acid
CXXXXXCXXXXXCXXXXXCXXXXXCXXXXXCPPPCXXXXXCXXXXXCXXXXXCXXXXXCXXXXXC

SEQ ID NO: 544 - protein, 76 aa, Artificial Sequence
  Description of Artificial Sequence: Synthetic amino acid sequence
  MOD_RES (2)..(6): Variable amino acid
  MOD_RES (8)..(12): Variable amino acid
  MOD_RES (14)..(18): Variable amino acid
  MOD_RES (20)..(24): Variable amino acid
  MOD_RES (27)..(30): Variable amino acid
  MOD_RES (33)..(37): Variable amino acid
  MOD_RES (40)..(44): Variable amino acid
  MOD_RES (47)..(50): Variable amino acid
  MOD_RES (53)..(57): Variable amino acid
  MOD_RES (59)..(63): Variable amino acid
  MOD_RES (65)..(69): Variable amino acid
  MOD_RES (71)..(75): Variable amino acid
CXXXXXCXXXXXCXXXXXCXXXXXCCXXXXCCXXXXXCCXXXXXCCXXXXCCXXXXXCXXXXXCXXXXXCXXXXXC

SEQ ID NO: 545 - protein, 67 aa, Artificial Sequence
  Description of Artificial Sequence: Synthetic amino acid sequence
  MOD_RES (2)..(6): Variable amino acid
  MOD_RES (8)..(12): Variable amino acid
  MOD_RES (14)..(18): Variable amino acid
  MOD_RES (20)..(24): Variable amino acid
  MOD_RES (27)..(30): Variable amino acid
  MOD_RES (32)..(36): Variable amino acid
  MOD_RES (38)..(41): Variable amino acid
  MOD_RES (44)..(48): Variable amino acid
  MOD_RES (50)..(54): Variable amino acid
  MOD_RES (56)..(60): Variable amino acid
  MOD_RES (62)..(66): Variable amino acid
CXXXXXCXXXXXCXXXXXCXXXXXCCXXXXCXXXXXCXXXXCCXXXXXCXXXXXCXXXXXCXXXXXC

SEQ ID NO: 546 - protein, 67 aa, Artificial Sequence
  Description of Artificial Sequence: Synthetic amino acid sequence
  MOD_RES (2)..(6): Variable amino acid
  MOD_RES (8)..(12): Variable amino acid
  MOD_RES (14)..(18): Variable amino acid
  MOD_RES (20)..(24): Variable amino acid
  MOD_RES (26)..(29): Variable amino acid
  MOD_RES (32)..(36): Variable amino acid
  MOD_RES (39)..(42): Variable amino acid
  MOD_RES (44)..(48): Variable amino acid
  MOD_RES (50)..(54): Variable amino acid
  MOD_RES (56)..(60): Variable amino acid
  MOD_RES (62)..(66): Variable amino acid
CXXXXXCXXXXXCXXXXXCXXXXXCXXXXCCXXXXXCCXXXXCXXXXXCXXXXXCXXXXXCXXXXXC

SEQ ID NO: 547 - protein, 81 aa, Artificial Sequence
  Description of Artificial Sequence: Synthetic amino acid sequence
  MOD_RES (2)..(6): Variable amino acid
  MOD_RES (8)..(12): Variable amino acid
  MOD_RES (14)..(18): Variable amino acid
  MOD_RES (20)..(24): Variable amino acid
  MOD_RES (26)..(30): Variable amino acid
  MOD_RES (33)..(37): Variable amino acid
  MOD_RES (39)..(43): Variable amino acid
  MOD_RES (45)..(49): Variable amino acid
  MOD_RES (52)..(56): Variable amino acid
  MOD_RES (58)..(62): Variable amino acid
  MOD_RES (64)..(68): Variable amino acid
  MOD_RES (70)..(74): Variable amino acid
  MOD_RES (76)..(80): Variable amino acid
CXXXXXCXXXXXCXXXXXCXXXXXCXXXXXCCXXXXXCXXXXXCXXXXXCCXXXXXCXXXXXCXXXXXCXXXXXCXXXXXC

SEQ ID NO: 548 - protein, 76 aa, Artificial Sequence
  Description of Artificial Sequence: Synthetic amino acid sequence
  MOD_RES (2)..(6): Variable amino acid
  MOD_RES (8)..(12): Variable amino acid
  MOD_RES (14)..(18): Variable amino acid
  MOD_RES (20)..(24): Variable amino acid
  MOD_RES (26)..(30): Variable amino acid
  MOD_RES (33)..(44): Variable amino acid
  MOD_RES (47)..(51): Variable amino acid
  MOD_RES (53)..(57): Variable amino acid
  MOD_RES (59)..(63): Variable amino acid
  MOD_RES (65)..(69): Variable amino acid
  MOD_RES (71)..(75): Variable amino acid
CXXXXXCXXXXXCXXXXXCXXXXXCXXXXXCCXXXXXXXXXXXXCCXXXXXCXXXXXCXXXXXCXXXXXCXXXXXC

SEQ ID NO: 549 - protein, 20 aa, Artificial Sequence
  Description of Artificial Sequence: Synthetic amino acid sequence
  MOD_RES (2)..(6): Variable amino acid
  MOD_RES (8)..(9): Variable amino acid
  MOD_RES (11)..(13): Variable amino acid
  MOD_RES (15)..(16): Variable amino acid
  MOD_RES (18)..(19): Variable amino acid
CXXXXXCXXCXXXCXXCXXC

SEQ ID NO: 550 - protein, 35 aa, Artificial Sequence
  Description of Artificial Sequence: Synthetic amino acid sequence
  MOD_RES (2)..(6): Variable amino acid
  MOD_RES (8)..(9): Variable amino acid
  MOD_RES (11)..(13): Variable amino acid
  MOD_RES (15)..(16): Variable amino acid
  MOD_RES (18)..(19): Variable amino acid
  MOD_RES (21)..(25): Variable amino acid
  MOD_RES (27)..(31): Variable amino acid
  MOD_RES (33)..(35): Variable amino acid
CXXXXXCXXCXXXCXXCXXCXXXXXCXXXXXCXXX

SEQ ID NO: 551 - protein, 55 aa, Artificial Sequence
  Description of Artificial Sequence: Synthetic amino acid sequence
  MOD_RES (2)..(6): Variable amino acid
  MOD_RES (8)..(9): Variable amino acid
  MOD_RES (11)..(13): Variable amino acid
  MOD_RES (15)..(16): Variable amino acid
  MOD_RES (18)..(19): Variable amino acid
  MOD_RES (21)..(25): Variable amino acid
  MOD_RES (27)..(31): Variable amino acid
  MOD_RES (33)..(35): Variable amino acid
  MOD_RES (37)..(41): Variable amino acid
  MOD_RES (43)..(44): Variable amino acid
  MOD_RES (46)..(48): Variable amino acid
  MOD_RES (50)..(51): Variable amino acid
  MOD_RES (53)..(54): Variable amino acid
CXXXXXCXXCXXXCXXCXXCXXXXXCXXXXXCXXXCXXXXXCXXCXXXCXXCXXC

SEQ ID NO: 552 - protein, 65 aa, Artificial Sequence
  Description of Artificial Sequence: Synthetic amino acid sequence
  MOD_RES (2)..(6): Variable amino acid
  MOD_RES (8)..(9): Variable amino acid
  MOD_RES (11)..(13): Variable amino acid
  MOD_RES (15)..(19): Variable amino acid
  MOD_RES (22)..(23): Variable amino acid
  MOD_RES (25)..(27): Variable amino acid
  MOD_RES (29)..(33): Variable amino acid
  MOD_RES (36)..(37): Variable amino acid
  MOD_RES (39)..(41): Variable amino acid
  MOD_RES (43)..(47): Variable amino acid
  MOD_RES (50)..(51): Variable amino acid
  MOD_RES (53)..(55): Variable amino acid
  MOD_RES (57)..(61): Variable amino acid
  MOD_RES (63)..(64): Variable amino acid
CXXXXXCXXCXXXCXXXXXCCXXCXXXCXXXXXCCXXCXXXCXXXXXCCXXCXXXCXXXXXCXXC

SEQ ID NO: 553 - protein, 47 aa, Artificial Sequence
  Description of Artificial Sequence: Synthetic amino acid sequence
  MOD_RES (2)..(3): Variable amino acid
  MOD_RES (5)..(6): Variable amino acid
  MOD_RES (8)..(10): Variable amino acid
  MOD_RES (12)..(13): Variable amino acid
  MOD_RES (16)..(16): Variable amino acid
  MOD_RES (18)..(20): Variable amino acid
  MOD_RES (22)..(23): Variable amino acid
  MOD_RES (26)..(26): Variable amino acid
  MOD_RES (28)..(30): Variable amino acid
  MOD_RES (32)..(33): Variable amino acid
  MOD_RES (36)..(36): Variable amino acid
  MOD_RES (38)..(40): Variable amino acid
  MOD_RES (42)..(43): Variable amino acid
  MOD_RES (46)..(46): Variable amino acid
CXXCXXCXXXCXXCCXCXXXCXXCCXCXXXCXXCCXCXXXCXXCCXC

SEQ ID NO: 554 - protein, 37 aa, Artificial Sequence
  Description of Artificial Sequence: Synthetic amino acid sequence
CHPTGQFRCRSSGRCVSPTWVCDGDNDCGDNSDEENC

SEQ ID NO: 555 - protein, 26 aa, Artificial Sequence
  Description of Artificial Sequence: Synthetic amino acid sequence
  MOD_RES (20)..(20): May or may not be present
  MOD_RES (22)..(22): Variable amino acid
QCTGGADCTSCTGACTGCGADXTSCG

SEQ ID NO: 556 - protein, 58 aa, Artificial Sequence; identical to SEQ ID NO: 490
  Description of Artificial Sequence: Synthetic amino acid sequence
  MOD_RES (1)..(3): Variable amino acid
  MOD_RES (5)..(10): Variable amino acid
  MOD_RES (12)..(16): Variable amino acid
  MOD_RES (19)..(26): Variable amino acid
  MOD_RES (29)..(34): Variable amino acid
  MOD_RES (37)..(41): Variable amino acid
  MOD_RES (44)..(48): Variable amino acid
  MOD_RES (50)..(55): Variable amino acid
  MOD_RES (57)..(58): Variable amino acid

SEQ ID NO: 557 - protein, 45 aa, Artificial Sequence
  Description of Artificial Sequence: Synthetic amino acid sequence
  MOD_RES (1)..(5): Variable amino acid
  MOD_RES (7)..(12): Variable amino acid
  MOD_RES (14)..(17): Variable amino acid
  MOD_RES (19)..(24): Variable amino acid
  MOD_RES (27)..(29): Variable amino acid
  MOD_RES (32)..(32): Variable amino acid
  MOD_RES (34)..(35): Variable amino acid
  MOD_RES (37)..(39): Variable amino acid
  MOD_RES (41)..(45): Variable amino acid
XXXXXCXXXXXXCXXXXCXXXXXXCDXXXDCXDXXDXXXCXXXXX

SEQ ID NO: 558 - protein, 35 aa, Artificial Sequence
  Description of Artificial Sequence: Synthetic amino acid sequence
  MOD_RES (2)..(7): Variable amino acid
  MOD_RES (9)..(12): Variable amino acid
  MOD_RES (14)..(19): Variable amino acid
  MOD_RES (22)..(24): Variable amino acid
  MOD_RES (27)..(27): Variable amino acid
  MOD_RES (29)..(30): Variable amino acid
  MOD_RES (32)..(34): Variable amino acid
CXXXXXXCXXXXCXXXXXXCDXXXDCXDXXDXXXC

SEQ ID NO: 559 - protein, 70 aa, Homo sapiens
CENVDCGPGKKCRMNKKNKPRCVCAPDCSNITWKGPVCGLDGKTYRNECALLKARCKEQPELEVQYQGKC

SEQ ID NO: 560 - protein, 72 aa, Homo sapiens
CRDVFCPGSSTCVVDQTNNAYCVTCNRICPEPSSSEQSLCGNDGVTYSSACHLRKATCLLGRSIGLAYEGKC

SEQ ID NO: 561 - protein, 72 aa, Homo sapiens
CEDIQCGGGKKCLWDFKVGRGRCSLCDELCPDSKSDEPVCASDNATYASECAMKEAACSSGVLLEVKHSGSC

SEQ ID NO: 562 - protein, 78 aa, Homo sapiens
CQNHHCKHGKVCELDENNTPMCVCQDPTSCPAPIGEFEKVCSNDNKTFDSSCHFFATKCTLEGTKKGHKLHLDYIGPC

SEQ ID NO: 563 - protein, 48 aa, Homo sapiens
EGGEPCACPHALHRVCGSDGETYSNPCTLNCAKFNGKPELVKVHDGPC

SEQ ID NO: 564 - protein, 56 aa, Homo sapiens
LAAVSVDCSEYPKPACTMEYRPLCGSDNKTYGNKCNFCNAVVESNGTLTLSHFGKC

SEQ ID NO: 565 - protein, 56 aa, Homo sapiens
TSPQREATCTSEVSGCPKIYNPVCGTDGITYSNECVLCSENKKRQTPVLIQKSGPC

SEQ ID NO: 566 - protein, 20 aa, Homo sapiens
CASSPCQNGGSCKDSYICFC

SEQ ID NO: 567 - protein, 6 aa, Artificial Sequence
  Description of Artificial Sequence: Synthetic 6xHis tag
HHHHHH

SEQ ID NO: 568 - protein, 28 aa, Artificial Sequence
  Description of Artificial Sequence: Synthetic amino acid sequence
  MOD_RES (2)..(6): Variable amino acid
  MOD_RES (8)..(13): Variable amino acid
  MOD_RES (15)..(17): Variable amino acid
  MOD_RES (19)..(23): Variable amino acid
  MOD_RES (25)..(27): Variable amino acid
CXXXXXCXXXXXXCXXXCXXXXXCXXXC

SEQ ID NO: 569 - protein, 37 aa, Homo sapiens
CRLREYYDQTAQMCCSKCSPGQHAKVFCTKTSDTVCD

SEQ ID NO: 570 - protein, 42 aa, Homo sapiens
SCEDSTYTQLWNWVPECLSCGSRCSSDQVETQACTREQNRIC

SEQ ID NO: 571 - protein, 42 aa, Homo sapiens
TCRPGWYCALSKQEGCRLCAPLRKCRPGFGVARPGTETSDVV

SEQ ID NO: 572 - protein, 40 aa, Homo sapiens
CKPCAPGTFSNTTSSTDICRPHQICNVVAIPGNASMDAVC

SEQ ID NO: 573 - protein, 40 aa, Homo sapiens
VCPQGKYIHPQNNSICCTKCHKGTYLYNDCPGPGQDTDCR

SEQ ID NO: 574 - protein, 43 aa, Homo sapiens
ECESGSFTASENHLRHCLSCSKCRKEMGQVEISSCTVDRDTVC

SEQ ID NO: 575 - protein, 41 aa, Homo sapiens
GCRKNQYRHYWSENLFQCFNCSLCLNGTVHLSCQEKQNTVC

SEQ ID NO: 576 - protein, 30 aa, Homo sapiens
TCHAGFFLRENECVSCSNCKKSLECTKLCL

What is claimed is:

1. A non-naturally occurring cysteine (C)-containing protein comprising a polypeptide having no more than 35 amino acids, in which
at least 10% of the amino acids in the polypeptide are cysteines,
at least two disulfide bonds are formed by pairing intra-scaffold cysteines, and wherein said pairing yields a complexity index greater than 3.

2. A non-naturally occurring cysteine (C)-containing protein comprising a polypeptide having no more than about 60 amino acids, in which
at least 10% of the amino acids in the polypeptide are cysteines,
at least four disulfide bonds are formed by pairing cysteines contained in the polypeptide, and wherein said pairing yields a complexity index greater than 4.

3. The non-naturally occurring cysteine (C)-containing protein of claim 1 or 2, wherein the complexity index greater than 6.

4. The non-naturally occurring cysteine (C)-containing protein of claim 1 or 2, wherein the complexity index greater than 10.

5. The non-naturally occurring cysteine (C)-containing protein of claim 1 or 2 that binds specifically to a target molecule.

6. The non-naturally occurring cysteine (C)-containing protein of claim 1 or 2 that remains the target binding capability after being heated to a temperature higher than about 50° C.

7. The non-naturally occurring cysteine (C)-containing protein of claim 1 or 2 that remains the target binding capability after being heated to a temperature higher than about 80° C.

8. The non-naturally occurring cysteine (C)-containing protein of claim 1 or 2 that remains the target binding capability after being heated to a temperature higher than about 100° C. and for more than 0.1 second.

9. The non-naturally occurring cysteine (C)-containing protein of claim 1 or 2 that is conjugated to a moiety selected from the group consisting of labels, effectors, antibodies, and half-life extending moieties.

10. The non-naturally occurring cysteine (C)-containing protein of claim 1 or 2 being a monomer.

11. The non-naturally occurring cysteine (C)-containing protein of claim 1 or 2 being a multimer.

12. The non-naturally occurring cysteine (C)-containing protein of claim 1 or 2, wherein the protein comprises one type of scaffold.

13. The non-naturally occurring cysteine (C)-containing protein of claim 1 or 2, wherein the protein comprises more than one type of scaffold.

14. The non-naturally occurring cysteine (C)-containing protein of claim 1 or 2, wherein the protein comprises a target binding site and half-life extension moiety.

15. The non-naturally occurring cysteine (C)-containing protein of claim 1 or 2, wherein the protein comprises repeating units that bind to the target.

16. The non-naturally occurring cysteine (C)-containing protein of claim 1 or 2, wherein the protein comprises a half-life extension moiety selected from the group consisting of serum albumin, IgG, erythrocytes, and proteins accessible to the serum.

17. The non-naturally occurring cysteine (C)-containing protein exhibiting binding specificity towards a target distinct from the native target of the corresponding naturally-occurring cysteine (C)-containing protein or scaffold.

18. A non-natural protein containing a single domain of 20-60 amino acids which has 3 or more disulfides and binds to a human serum-exposed protein, and wherein said protein has less than 5% aliphatic amino acids.

19. A non-naturally occurring protein containing a single domain of 20-60 amino acids which has 3 or more disulfides and binds to a human serum-exposed protein, wherein said protein has a score in the T-Epitope program that is less than 90% of the average for proteins in the database.

20. A library of the non-naturally occurring protein of claim 1, 2, 18 or 19.

21. A genetic package displaying the library of claim 20.

22. A method of detecting the presence of a specific interaction between a target and an exogenous polypeptide that is displayed on a genetic package, the method comprising:
(a) providing a genetic package displaying of claim 20;
(b) contacting the genetic package with the target under conditions suitable to produce a stable polypeptide-target complex; and
(c) detecting the formation of the stable polypeptide-target complex on the genetic package, thereby detecting the presence of a specific interaction.

23. The method of claim 22 further comprising the step of isolating the genetic package that displays a polypeptide having the desired property.

24. A pharmaceutical composition comprising the non-naturally occurring cysteine (C)-containing protein of claim 1 or 2 and a pharmaceutically acceptable carrier.
